(19) United States
(12) Patent Application Publication
(10) Pub. No.: US 2003/0166229 A1
(43) Pub. Date: Sep. 4, 2003

(54) Human POSH-like protein 1

(76) Inventor: Mark Shannon, Livermore, CA (US)

Correspondence Address: Stephen G. Ryan, Amersham Biosciences, 800 Centennial Avenue, Piscataway, NJ, 08855, US

(21) Appl. No.: 10/061,201

(22) Filed: Jan. 30, 2002

Related U.S. Application Data
(63) Continuation-in-part of application No. 09/864,761, filed on May 23, 2001.
(60) Provisional application No. 60/328,205, filed on Oct. 10, 2001.

(30) Foreign Application Priority Data
Jan. 30, 2001 (WO) PCT/US01/00663
Jan. 30, 2001 (WO) PCT/US01/00664
Jan. 30, 2001 (WO) PCT/US01/00665
Jan. 30, 2001 (WO) PCT/US01/00666
Jan. 30, 2001 (WO) PCT/US01/00667
Jan. 30, 2001 (WO) PCT/US01/00668
Jan. 30, 2001 (WO) PCT/US01/00669
Jan. 30, 2001 (WO) PCT/US01/00670

(51) Int. Cl. C12N 9/22; C07H 21/04; C12P 21/02; C12N 5/06

(52) U.S. Cl. 435/199; 435/69.1; 435/325; 435/320.1; 536/23.2

(57) ABSTRACT

The invention provides isolated nucleic acids that encode human POSHL1, and fragments thereof, vectors for propagating and expressing human POSHL1 nucleic acids, host cells comprising the nucleic acids and vectors of the present invention, proteins, protein fragments, and protein fusions of the novel human POSHL1 isoforms, and antibodies thereto. The invention further provides transgenic cells and non-human organisms comprising human POSHL1 nucleic acids, and transgenic cells and non-human organisms with targeted disruption of the endogenous orthologue of the human POSHL1 gene. The invention further provides pharmaceutical formulations of the nucleic acids, proteins, and antibodies of the present invention, and diagnostic, investigational, and therapeutic methods based on the human POSHL1 nucleic acids, proteins, and antibodies of the present invention.

### CROSS REFERENCE TO RELATED APPLICATIONS

[0001] This application claims priority under 35 U.S.C. § 365(c) to international patent application no. PCT/US01/00663, PCT/US01/00664, PCT/US01/00665, PCT/US01/00666, PCT/US01/00667, PCT/US01/00668, PCT/US01/00669, and PCT/US01/00670, all filed Jan. 30, 2001; claims priority under 35 U.S.C. § 120 to commonly owned and copending U.S. application Ser. No. 09/864,761, filed May 23, 2001; claims priority to U.S. provisional application serial No. 60/328,205, filed Oct. 10, 2001; the disclosures of which are incorporated herein by reference in their entireties.

### REFERENCE TO SEQUENCE LISTING SUBMITTED ON COMPACT DISC

[0002] The present application includes a Sequence Listing filed on a single CD-R disc, provided in duplicate, containing a single file named pto_PB0178.txt, having 594 kilobytes, last modified on Jan. 17, 2002 and recorded Jan. 24, 2002. The Sequence Listing contained in said file on said disc is incorporated herein by reference in its entirety.

### FIELD OF THE INVENTION

[0003] The present invention relates to novel human POSH-like protein 1. More specifically, the invention provides isolated nucleic acid molecules encoding human POSH-like protein 1, fragments thereof, vectors and host cells comprising isolated nucleic acid molecules encoding human POSH-like protein 1, human POSH-like protein 1 polypeptides, antibodies, transgenic cells and non-human organisms, and diagnostic, therapeutic, and investigational methods of using the same.

### BACKGROUND OF THE INVENTION

[0004] Members of the Rho family of small GTPases (including Rho, Rac, and Cdc42) play central roles in the transduction of extracellular signals from the cell membrane to downstream effector molecules in the cytoplasm and nucleus and are highly conserved among eukaryotes (reviewed by Takai Y. et al., Physiol. Rev. 18:153-208 (2001); Hall A., Science 279:509-514 (1998)). This class of signaling molecules primarily affects activities associated with the actin cytoskeleton, but can also influence gene expression.

[0005] Small GTPases of the Rho family exist in two states: an active GTP-bound form that is preferentially associated with membrane-bound structures and an inactive GDP-bound form that is largely found in the cytoplasm (reviewed by Bishop A. L. and Hall A, Biochem. J. 348:241-255 (2000)). The active form of Rho is capable of interacting with a diverse set of effector molecules that includes protein kinases and adaptor molecules that specifically result in changes in the actin cytoskeleton and/or activate kinase cascades that lead to changes in gene expression. Hydrolysis of GTP by members of the Rho family of GTPases converts the proteins into inactive molecules that no longer bind to their target effector proteins. Thus, the cycling of Rho GTPases between active and inactive forms serves as a ‘molecular switch’ that controls the timing and duration of effector signaling and/or activation, events that are likely to be crucial for maintaining a normal physiological state.

[0006] Although all known members of the Rho family of GTPases exert effects on the actin cytoskeleton, the outcomes of activation of individual family members are variable. For instance, Rho activation results primarily in the formation of stress fibers and has been implicated in the processes of cell adhesion, determination of cell polarity, and cell migration in epithelia (Assoian R. K. and Zhu X., Curr. Opin. Cell Biol. 9:93-98 (1997); Braga V. M. M. et al., J. Cell Biol. 137:1421-1431 (1997); Schmitz A. A. et al., Exp. Cell Res. 261:1-12 (2000)). By contrast, Rac activation leads to the formation of lamellipodia or membrane ruffles (Ridley et al., Cell 70:401-410 (1992)) and appears to be associated with directed cell migration and axonal guidance (Van Aelst and D'Souza-Schorey, Genes Dev. 11:2295-2322 (1997)). It is therefore not surprising that aberrant expression of Rho family members and their upstream regulators and downstream targets has been associated with cell transformation and tumors in human patients (Ridley A. J. Int. J. Biochem. Cell Biol. 29:1225-1229 (1997); Aznar S. and Lacal. J. C., Cancer Lett. 165:1-10 (2001)) and is likely to have an impact on tumor invasiveness and metastasis.

[0007] Members of the Rho family of small GTPases also participate in the activation of gene expression (Marinissen J. M. et al., Genes Dev. 15:535-553 (2001)). Specifically, it has been shown that Rho GTPases can stimulate c-jun expression via a direct kinase (JNK) cascade that can result in the activation of ERK6, a member of the MAPK family of kinases.

[0008] Although Rho, Rac, and Cdc42 exert effects on both the organization of the cytoskeleton and gene expression, evidence suggests that, at least for Rac, these two outcomes are controlled by distinct signaling pathways and involve the activation of different target proteins. The evidence comes primarily from mutational studies of Rac, which have shown that certain amino acid substitutions prevent the induction of membrane ruffles while allowing normal activation of the JNK cascade and vice versa (Joneson et al., Science 271:810-812 (1996); Lamarche et al., Cell 87:519-529 (1996); Westwick et al., Mol. Cell Biol. 17:1324-1335 (1997)). However, the identities and properties of the downstream targets of Rac that mediate these disparate outcomes are not completely known and are the subject of intense exploration.

[0009] Recently, a novel Rac-interacting protein was identified and shown to participate specifically in the activation of the JNK pathway, leading to activation of gene expression in response to PDGF stimulation in COS cells (Tapon et al., EMBO J. 17:1395-1404 (1998)). This protein, termed POSH (Plenty of SH3 domains), contains an N-terminal RING finger domain and four SH3 domains. Full-length POSH protein was found to activate the JNK cascade, but had no effect on actin reorganization. The N-terminal RING finger, first two SH3 domains and Rac binding region were required for this activity. By contrast, the C-terminal two SH3 domains were found to be necessary and sufficient for nuclear translocation of NF-kB, a known transcription factor.

[0010] Given a likely role for POSH as an adaptor protein that interacts with Rac as well as components of the JNK kinase cascade and its potential role as a proto-oncogene/oncogene there is a need to identify and to characterize additional human genes with structural and functional similarity to POSH.

### SUMMARY OF THE INVENTION

[0011] The present invention solves these and other needs in the art by providing isolated nucleic acids that encode POSH-like signaling protein 1 (POSHL1), and fragments thereof.

[0012] In other aspects, the invention provides vectors for propagating and expressing the nucleic acids of the present invention, host cells comprising the nucleic acids and vectors of the present invention, proteins, protein fragments, and protein fusions of the human POSHL1, and antibodies thereto.

[0013] The invention further provides pharmaceutical formulations of the nucleic acids, proteins, and antibodies of the present invention.

[0014] In other aspects, the invention provides transgenic cells and non-human organisms comprising human POSHL1 nucleic acids, and transgenic cells and non-human organisms with targeted disruption of the endogenous orthologue of the human POSHL1.

[0015] The invention additionally provides diagnostic, investigational, and therapeutic methods based on the human POSHL1 nucleic acids, proteins, and antibodies of the present invention.

### BRIEF DESCRIPTION OF THE DRAWINGS

[0016] The above and other objects and advantages of the present invention will be apparent upon consideration of the following detailed description taken in conjunction with the accompanying drawings, in which like characters refer to like parts throughout, and in which:

[0017] FIG. 1 (A) schematizes the protein domain structure of human POSHL1, FIG. 1 (B) shows the alignment of the RING domain of POSHL1 with that of other proteins, FIG. 1 (C) shows the alignment of the first SH3 domain of POSHL1 with that of other proteins, FIG. 1 (D) shows the alignment of the second SH3 domain of POSHL1 with that of other proteins, and FIG. 1 (E) shows the alignment of the third SH3 domain of POSHL1 with that of other proteins;

[0018] FIG. 2 is a map showing the genomic structure of human POSHL1 encoded at chromosome 5q32;

[0019] FIG. 3 presents the nucleotide and predicted amino acid sequences of human POSHL1; and

[0020] FIG. 3 presents the expression analysis of POSHL1 using RT-PCR.

### DETAILED DESCRIPTION OF THE INVENTION

[0021] Mining the sequence of the human genome for novel human genes, the present inventors have identified human POSHL1, a proto-oncogene/oncogene product that functions as an adaptor protein that interacts with Rho family small GTPases as well as downstream components of the signal transduction pathway.

[0022] As schematized in FIG. 1, the newly isolated gene product shares certain protein domains and an overall structural organization with mouse POSH protein. The shared structural features strongly imply that human POSHL1 plays a role similar to that of mouse POSH protein in interacting with members of the Rho family small GTPases, as well as components of the JNK kinase cascade. POSHL1 is a potential proto-oncogene/oncogene.

[0023] Like mouse POSH protein, human POSHL1 has one N-terminal RING finger domain and several SH3 domains (three SH3 domains for POSHL1 and four for POSH). In POSHL1, the RING finger domain occurs at residues 12-52 and the three SH3 domains occur at residues 126-182, 188-249, and 381-439 respectively (http://www.ncbi.nlm.nih.gov/Structure/cdd). E3 ubiquitin-protein ligase activity is intrinsic to the RING finger domain of c-Cbl and is likely to be a general function of this domain. Various RING finger domains exhibit binding activity towards E2 ubiquitin-conjugating enzymes (Ubc's). SH3 (Src homology 3) domains are often indicative of a protein involved in signal transduction related to cytoskeletal organization. SH3 domain was first described in the Src cytoplasmic tyrosine kinase. The structure of SH3 is a partly opened beta barrel.

[0024] Other signatures of the newly isolated POSHL1 proteins were identified by searching the PROSITE database (http://www.expasy.ch/tools/scnpsit1.html). These include four N-glycosylation sites (250-253, 270-273, 281-284, and 519-522), two cAMP- and cGMP-dependent protein kinase phosphorylation sites (441-444 and 704-707), fifteen Protein kinase C phosphorylation sites, nine Casein kinase II phosphorylation sites, a single tyrosine kinase phosphorylation site (155-163), twelve N-myristoylation site, and a single amidation site (98-101).

[0025] FIG. 2 shows the genomic organization of human POSHL1. At the top is shown the three bacterial artificial chromosomes (BACs), with GenBank accession numbers, that span the POSHL1 locus. The genome-derived single-exon probe first used to demonstrate expression from this locus is shown below the BACs and labeled “474”. The 474 bp probe includes sequence drawn from exon 9, with additional sequence from intron 8.

[0026] As shown in FIG. 2, POSHL1, encoding a protein of 729 amino acids, comprises exons 1-10. Predicted molecular weight, prior to any post_translational modification, is 79.2 kD. The cDNA clone appears full length, with the open reading frame starting with a methionine and terminating with a stop codon.

[0027] As further discussed in the examples herein, expression of POSHL1 was assessed using hybridization to genome-derived single exon microarrays and RT-PCR. Microarray analysis of the exon nine showed expression in all tissues tested, including brain, lung, kidney, prostate, adrenal gland, placenta, bone marrow, and adult and fetal liver. RT-PCR confirmed microarray data, and further provided expression data for testis and skeletal muscle.

[0028] As more fully described below, the present invention provides isolated nucleic acids that encode human POSHL1 and fragments thereof. The invention further provides vectors for propagation and expression of the nucleic acids of the present invention, host cells comprising the nucleic acids and vectors of the present invention, proteins, protein fragments, and protein fusions of the present invention, and antibodies specific for all or any one of the isoforms. The invention provides pharmaceutical formulations of the nucleic acids, proteins, and antibodies of the present invention. The invention further provides transgenic cells and non-human organisms comprising human POSHL1 nucleic acids, and transgenic cells and non-human organisms with targeted disruption of the endogenous orthologue of the human POSHL1. The invention additionally provides diagnostic, investigational, and therapeutic methods based on the human POSHL1 nucleic acids, proteins, and antibodies of the present invention.

[0029] DEFINITIONS

[0030] Unless defined otherwise, all technical and scientific terms used herein have the meaning commonly understood by one of ordinary skill in the art to which this invention belongs.

[0031] As used herein, “nucleic acid” (synonymously, “polynucleotide”) includes polynucleotides having natural nucleotides in native 5′-3′ phosphodiester linkage—e.g., DNA or RNA—as well as polynucleotides that have nonnatural nucleotide analogues, nonnative internucleoside bonds, or both, so long as the nonnatural polynucleotide is capable of sequence-discriminating basepairing under experimentally desired conditions. Unless otherwise specified, the term “nucleic acid” includes any topological conformation; the term thus explicitly comprehends single-stranded, double-stranded, partially duplexed, triplexed, hairpinned, circular, and padlocked conformations.

[0032] As used herein, an “isolated nucleic acid” is a nucleic acid molecule that exists in a physical form that is nonidentical to any nucleic acid molecule of identical sequence as found in nature; “isolated” does not require, although it does not prohibit, that the nucleic acid so described has itself been physically removed from its native environment.

[0033] For example, a nucleic acid can be said to be “isolated” when it includes nucleotides and/or internucleoside bonds not found in nature. When instead composed of natural nucleosides in phosphodiester linkage, a nucleic acid can be said to be “isolated” when it exists at a purity not found in nature, where purity can be adjudged with respect to the presence of nucleic acids of other sequence, with respect to the presence of proteins, with respect to the presence of lipids, or with respect the presence of any other component of a biological cell, or when the nucleic acid lacks sequence that flanks an otherwise identical sequence in an organism's genome, or when the nucleic acid possesses sequence not identically present in nature.

[0034] As so defined, “isolated nucleic acid” includes nucleic acids integrated into a host cell chromosome at a heterologous site, recombinant fusions of a native fragment to a heterologous sequence, recombinant vectors present as episomes or as integrated into a host cell chromosome.

[0035] As used herein, an isolated nucleic acid “encodes” a reference polypeptide when at least a portion of the nucleic acid, or its complement, can be directly translated to provide the amino acid sequence of the reference polypeptide, or when the isolated nucleic acid can be used, alone or as part of an expression vector, to express the reference polypeptide in vitro, in a prokaryotic host cell, or in a eukaryotic host cell.

[0036] As used herein, the term “exon” refers to a nucleic acid sequence found in genomic DNA that is bioinformatically predicted and/or experimentally confirmed to contribute contiguous sequence to a mature mRNA transcript.

[0037] As used herein, the phrase “open reading frame” and the equivalent acronym “ORF” refer to that portion of a transcript-derived nucleic acid that can be translated in its entirety into a sequence of contiguous amino acids. As so defined, an ORF has length, measured in nucleotides, exactly divisible by 3. As so defined, an ORF need not encode the entirety of a natural protein.

[0038] As used herein, the phrase “ORF-encoded peptide” refers to the predicted or actual translation of an ORF.

[0039] As used herein, the phrase “degenerate variant” of a reference nucleic acid sequence intends all nucleic acid sequences that can be directly translated, using the standard genetic code, to provide an amino acid sequence identical to that translated from the reference nucleic acid sequence.

[0040] As used herein, the term “microarray” and the equivalent phrase “nucleic acid microarray” refer to a substrate-bound collection of plural nucleic acids, hybridization to each of the plurality of bound nucleic acids being separately detectable. The substrate can be solid or porous, planar or non-planar, unitary or distributed.

[0041] As so defined, the term “microarray” and phrase “nucleic acid microarray” include all the devices so called in Schena (ed.), DNA Microarrays: A Practical Approach (Practical Approach Series), Oxford University Press (1999) (ISBN: 0199637768); Nature Genet. 21(1)(suppl) :1-60 (1999); and Schena (ed.), Microarray Biochip: Tools and Technology, Eaton Publishing Company/BioTechniques Books Division (2000) (ISBN: 1881299376), the disclosures of which are incorporated herein by reference in their entireties.

[0042] As so defined, the term “microarray” and phrase “nucleic acid microarray” also include substrate-bound collections of plural nucleic acids in which the plurality of nucleic acids are distributably disposed on a plurality of beads, rather than on a unitary planar substrate, as is described, inter alia, in Brenner et al., Proc. Natl. Acad. Sci. USA 97(4) :166501670 (2000), the disclosure of which is incorporated herein by reference in its entirety; in such case, the term “microarray” and phrase “nucleic acid microarray” refer to the plurality of beads in aggregate.

[0043] As used herein with respect to solution phase hybridization, the term “probe”, or equivalently, “nucleic acid probe” or “hybridization probe”, refers to an isolated nucleic acid of known sequence that is, or is intended to be, detectably labeled. As used herein with respect to a nucleic acid microarray, the term “probe” (or equivalently “nucleic acid probe” or “hybridization probe”) refers to the isolated nucleic acid that is, or is intended to be, bound to the substrate. In either such context, the term “target” refers to nucleic acid intended to be bound to probe by sequence complementarity.

[0044] As used herein, the expression “probe comprising SEQ ID NO:X”, and variants thereof, intends a nucleic acid probe, at least a portion of which probe has either (i) the sequence directly as given in the referenced SEQ ID NO:X, or (ii) a sequence complementary to the sequence as given in the referenced SEQ ID NO:X, the choice as between sequence directly as given and complement thereof dictated by the requirement that the probe be complementary to the desired target.

[0045] As used herein, the phrases “expression of a probe” and “expression of an isolated nucleic acid” and their linguistic equivalents intend that the probe or, (respectively, the isolated nucleic acid), or a probe (or, respectively, isolated nucleic acid) complementary in sequence thereto,can hybridize detectably under high stringency conditions to a sample of nucleic acids that derive from mRNA transcripts from a given source. For example, and by way of illustration only, expression of a probe in “liver” means that the probe can hybridize detectably under high stringency conditions to a sample of nucleic acids that derive from mRNA obtained from liver.

[0046] As used herein, “a single exon probe” comprises at least part of an exon (“reference exon”) and can hybridize detectably under high stringency conditions to transcript-derived nucleic acids that include the reference exon. The single exon probe will not, however, hybridize detectably under high stringency conditions to nucleic acids that lack the reference exon and that consist of one or more exons that are found adjacent to the reference exon in the genome.

[0047] For purposes herein, “high stringency conditions” are defined for solution phase hybridization as aqueous hybridization (i.e., free of formamide) in 6×SSC (where 20×SSC contains 3.0 M NaCl and 0.3 M sodium citrate), 1% SDS at 65° C. for at least 8 hours, followed by one or more washes in 0.2×SSC, 0.1% SDS at 65° C. “Moderate stringency conditions” are defined for solution phase hybridization as aqueous hybridization (i.e., free of formamide) in 6×SSC, 1% SDS at 65° C. for at least 8 hours, followed by one or more washes in 2×SSC, 0.1% SDS at room temperature.

[0048] For microarray-based hybridization, standard “high stringency conditions” are defined as hybridization in 50% formamide, 5×SSC, 0.2μg/μl poly(dA), 0.2 μg/μl human cot1 DNA, and 0.5% SDS, in a humid oven at 42° C. overnight, followed by successive washes of the microarray in 1×SSC, 0.2% SDS at 55° C. for 5 minutes, and then 0.1×SSC, 0.2% SDS, at 55° C. for 20 minutes. For microarray-based hybridization, “moderate stringency conditions”, suitable for cross-hybridization to mRNA encoding structurally- and functionally-related proteins, are defined to be the same as those for high stringency conditions but with reduction in temperature for hybridization and washing to room temperature (approximately 25° C.).

[0049] As used herein, the terms “protein”, “polypeptide”, and “peptide” are used interchangeably to refer to a naturally-occurring or synthetic polymer of amino acid monomers (residues), irrespective of length, where amino acid monomer here includes naturally-occurring amino acids, naturally-occurring amino acid structural variants, and synthetic non-naturally occurring analogs that are capable of participating in peptide bonds. The terms “protein”, “polypeptide”, and “peptide” explicitly permits of post-translational and post-synthetic modifications, such as glycosylation.

[0050] The term “oligopeptide” herein denotes a protein, polypeptide, or peptide having 25 or fewer monomeric subunits.

[0051] The phrases “isolated protein”, “isolated polypeptide”, “isolated peptide” and “isolated oligopeptide” refer to a protein (or respectively to a polypeptide, peptide, or oligopeptide) that is nonidentical to any protein molecule of identical amino acid sequence as found in nature; “isolated” does not require, although it does not prohibit, that the protein so described has itself been physically removed from its native environment.

[0052] For example, a protein can be said to be “isolated” when it includes amino acid analogues or derivatives not found in nature, or includes linkages other than standard peptide bonds.

[0053] When instead composed entirely of natural amino acids linked by peptide bonds, a protein can be said to be “isolated” when it exists at a purity not found in nature—where purity can be adjudged with respect to the presence of proteins of other sequence, with respect to the presence of non-protein compounds, such as nucleic acids, lipids, or other components of a biological cell, or when it exists in a composition not found in nature, such as in a host cell that does not naturally express that protein.

[0054] A “purified protein” (equally, a purified polypeptide, peptide, or oligopeptide) is an isolated protein, as above described, present at a concentration of at least 95%, as measured on a weight basis with respect to total protein in a composition. A “substantially purified protein” (equally, a substantially purified polypeptide, peptide, or oligopeptide) is an isolated protein, as above described, present at a concentration of at least 70%, as measured on a weight basis with respect to total protein in a composition.

[0055] As used herein, the phrase “protein isoforms” refers to a plurality of proteins having nonidentical primary amino acid sequence but that share amino acid sequence encoded by at least one common exon.

[0056] As used herein, the phrase “alternative splicing” and its linguistic equivalents includes all types of RNA processing that lead to expression of plural protein isoforms from a single gene; accordingly, the phrase “splice variant(s)” and its linguistic equivalents embraces mRNAs transcribed from a given gene that, however processed, collectively encode plural protein isoforms. For example, and by way of illustration only, splice variants can include exon insertions, exon extensions, exon truncations, exon deletions, alternatives in the 5′untranslated region (“5′UT”) and alternatives in the 3′ untranslated region (“3′UT”). Such 3′ alternatives include, for example, differences in the site of RNA transcript cleavage and site of poly(A) addition. See, e.g., Gautheret et al., Genome Res. 8:524-530 (1998).

[0057] As used herein, “orthologues” are separate occurrences of the same gene in multiple species. The separate occurrences have similar, albeit nonidentical, amino acid sequences, the degree of sequence similarity depending, in part, upon the evolutionary distance of the species from a common ancestor having the same gene.

[0058] As used herein, the term “paralogues” indicates separate occurrences of a gene in one species. The separate occurrences have similar, albeit nonidentical, amino acid sequences, the degree of sequence similarity depending, in part, upon the evolutionary distance from the gene duplication event giving rise to the separate occurrences.

[0059] As used herein, the term “homologues” is generic to “orthologues” and “paralogues”.

[0060] As used herein, the term “antibody” refers to a polypeptide, at least a portion of which is encoded by at least one immunoglobulin gene, or fragment thereof, and that can bind specifically to a desired target molecule. The term includes naturally-occurring forms, as well as fragments and derivatives.

[0061] Fragments within the scope of the term “antibody” include those produced by digestion with various proteases, those produced by chemical cleavage and/or chemical dissociation, and those produced recombinantly, so long as the fragment remains capable of specific binding to a target molecule. Among such fragments are Fab, Fab′, Fv, F(ab)′₂, and single chain Fv (scFv) fragments.

[0062] Derivatives within the scope of the term include antibodies (or fragments thereof) that have been modified in sequence, but remain capable of specific binding to a target molecule, including: interspecies chimeric and humanized antibodies; antibody fusions; heteromeric antibody complexes and antibody fusions, such as diabodies (bispecific antibodies), single-chain diabodies, and intrabodies (see, e.g., Marasco (ed.), Intracellular Antibodies: Research and Disease Applications, Springer-Verlag New York, Inc. (1998) (ISBN: 3540641513), the disclosure of which is incorporated herein by reference in its entirety).

[0063] As used herein, antibodies can be produced by any known technique, including harvest from cell culture of native B lymphocytes, harvest from culture of hybridomas, recombinant expression systems, and phage display.

[0064] As used herein, “antigen” refers to a ligand that can be bound by an antibody; an antigen need not itself be immunogenic. The portions of the antigen that make contact with the antibody are denominated “epitopes”.

[0065] “Specific binding” refers to the ability of two molecular species concurrently present in a heterogeneous (inhomogeneous) sample to bind to one another in preference to binding to other molecular species in the sample. Typically, a specific binding interaction will discriminate over adventitious binding interactions in the reaction by at least two-fold, more typically by at least 10-fold, often at least 100-fold; when used to detect analyte, specific binding is sufficiently discriminatory when determinative of the presence of the analyte in a heterogeneous (inhomogeneous) sample. Typically, the affinity or avidity of a specific binding reaction is least about 10⁻⁷ M, with specific binding reactions of greater specificity typically having affinity or avidity of at least 10⁻⁸ M to at least about 10⁻⁹ M.

[0066] As used herein, “molecular binding partners”—and equivalently, “specific binding partners”—refer to pairs of molecules, typically pairs of biomolecules, that exhibit specific binding. Nonlimiting examples are receptor and ligand, antibody and antigen, and biotin to any of avidin, streptavidin, neutrAvidin and captAvidin.

[0067] The term “antisense”, as used herein, refers to a nucleic acid molecule sufficiently complementary in sequence, and sufficiently long in that complementary sequence, as to hybridize under intracellular conditions to (i) a target mRNA transcript or (ii) the genomic DNA strand complementary to that transcribed to produce the target mRNA transcript.

[0068] The term “portion”, as used with respect to nucleic acids, proteins, and antibodies, is synonymous with “fragment”.

[0069] Nucleic Acid Molecules

[0070] In a first aspect, the invention provides isolated nucleic acids that encode human POSHL1, variants having at least 65% sequence identity thereto, degenerate variants thereof, variants that encode human POSHL1 proteins having conservative or moderately conservative substitutions, cross-hybridizing nucleic acids, and fragments thereof.

[0071] FIG. 3 presents the nucleotide sequence of the human POSHL1 cDNA clone, with predicted amino acid translation; the sequences are further presented in the Sequence Listing, incorporated herein by reference in its entirety, in SEQ ID NOs: 1 (full length nucleotide sequence of human POSHL1 cDNA) and 3 (full length amino acid coding sequence of human POSHL1).

[0072] Unless otherwise indicated, each nucleotide sequence is set forth herein as a sequence of deoxyribonucleotides. It is intended, however, that the given sequence be interpreted as would be appropriate to the polynucleotide composition: for example, if the isolated nucleic acid is composed of RNA, the given sequence intends ribonucleotides, with uridine substituted for thymidine.

[0073] Unless otherwise indicated, nucleotide sequences of the isolated nucleic acids of the present invention were determined by sequencing a DNA molecule that had resulted, directly or indirectly, from at least one enzymatic polymerization reaction (e.g., reverse transcription and/or polymerase chain reaction) using an automated sequencer (such as the MegaBACE™ 1000, Amersham Biosciences, Sunnyvale, Calif., USA), or by reliance upon such sequence or upon genomic sequence prior-accessioned into a public database. Unless otherwise indicated, all amino acid sequences of the polypeptides of the present invention were predicted by translation from the nucleic acid sequences so determined.

[0074] As a consequence, any nucleic acid sequence presented herein may contain errors introduced by erroneous incorporation of nucleotides during polymerization, by erroneous base calling by the automated sequencer (although such sequencing errors have been minimized for the nucleic acids directly determined herein, unless otherwise indicated, by the sequencing of each of the complementary strands of a duplex DNA), or by similar errors accessioned into the public database. Such errors can readily be identified and corrected by resequencing of the genomic locus using standard techniques.

[0075] Single nucleotide polymorphisms (SNPs) occur frequently in eukaryotic genomes—more than 1.4 million SNPs have already identified in the human genome, International Human Genome Sequencing Consortium, Nature 409:860-921 (2001)—and the sequence determined from one individual of a species may differ from other allelic forms present within the population. Additionally, small deletions and insertions, rather than single nucleotide polymorphisms, are not uncommon in the general population, and often do not alter the function of the protein.

[0076] Accordingly, it is an aspect of the present invention to provide nucleic acids not only identical in sequence to those described with particularity herein, but also to provide isolated nucleic acids at least about 65% identical in sequence to those described with particularity herein, typically at least about 70%, 75%, 80%, 85%, or 90% identical in sequence to those described with particularity herein, usefully at least about 91%, 92%, 93%, 94%, or 95% identical in sequence to those described with particularity herein, usefully at least about 96%, 97%, 98%, or 99% identical in sequence to those described with particularity herein, and, most conservatively, at least about 99.5%, 99.6%, 99.7%, 99.8% and 99.9% identical in sequence to those described with particularity herein. These sequence variants can be naturally occurring or can result from human intervention, as by random or directed mutagenesis.

[0077] For purposes herein, percent identity of two nucleic acid sequences is determined using the procedure of Tatiana et al., “Blast 2 sequences—a new tool for comparing protein and nucleotide sequences”, FEMS Microbiol Lett. 174:247-250 (1999), which procedure is effectuated by the computer program BLAST 2 SEQUENCES, available online at http://www.ncbi.nlm.nih.gov/blast/bl2seq/bl2.html. To assess percent identity of nucleic acids, the BLASTN module of BLAST 2 SEQUENCES is used with default values of (i) reward for a match: 1; (ii) penalty for a mismatch: −2; (iii) open gap 5 and extension gap 2 penalties; (iv) gap X_dropoff 50 expect 10 word size 11 filter, and both sequences are entered in their entireties.

[0078] As is well known, the genetic code is degenerate, with each amino acid except methionine translated from a plurality of codons, thus permitting a plurality of nucleic acids of disparate sequence to encode the identical protein. As is also well known, codon choice for optimal expression varies from species to species. The isolated nucleic acids of the present invention being useful for expression of human POSHL1 proteins and protein fragments, it is, therefore, another aspect of the present invention to provide isolated nucleic acids that encode human POSHL1 proteins and portions thereof not only identical in sequence to those described with particularity herein, but degenerate variants thereof as well.

[0079] As is also well known, amino acid substitutions occur frequently among natural allelic variants, with conservative substitutions often occasioning only de minimis change in protein function.

[0080] Accordingly, it is an aspect of the present invention to provide nucleic acids not only identical in sequence to those described with particularity herein, but also to provide isolated nucleic acids that encode human POSHL1, and portions thereof, having conservative amino acid substitutions, and also to provide isolated nucleic acids that encode human POSHL1, and portions thereof, having moderately conservative amino acid substitutions.

[0081] Although there are a variety of metrics for calling conservative amino acid substitutions, based primarily on either observed changes among evolutionarily related proteins or on predicted chemical similarity, for purposes herein a conservative replacement is any change having a positive value in the PAM250 log-likelihood matrix reproduced herein below (see Gonnet et al., Science 256(5062) :1443-5 (1992)) :

| | A | R | N | D | C | Q | E | G | H | I | L | K | M | F | P | S | T | W | Y | V |
|---|---|---|---|---|---|---|---|---|---|---|---|---|---|---|---|---|---|---|---|---|
| A | 2 | −1 | 0 | 0 | 0 | 0 | 0 | 0 | −1 | −1 | −1 | 0 | −1 | −2 | 0 | 1 | 1 | −4 | −2 | 0 |
| R | −1 | 5 | 0 | 0 | −2 | 2 | 0 | −1 | 1 | −2 | −2 | 3 | −2 | −3 | −1 | 0 | 0 | −2 | −2 | −2 |
| N | 0 | 0 | 4 | 2 | −2 | 1 | 1 | 0 | 1 | −3 | −3 | 1 | −2 | −3 | −1 | 1 | 0 | −4 | −1 | −2 |
| D | 0 | 0 | 2 | 5 | −3 | 1 | 3 | 0 | 0 | −4 | −4 | 0 | −3 | −4 | −1 | 0 | 0 | −5 | −3 | −3 |
| C | 0 | −2 | −2 | −3 | 12 | −2 | −3 | −2 | −1 | −1 | −2 | −3 | −1 | −1 | −3 | 0 | 0 | −1 | 0 | 0 |
| Q | 0 | 2 | 1 | 1 | −2 | 3 | 2 | −1 | 1 | −2 | −2 | 2 | −1 | −3 | 0 | 0 | 0 | −3 | −2 | −2 |
| E | 0 | 0 | 1 | 3 | −3 | 2 | 4 | −1 | 0 | −3 | −3 | 1 | −2 | −4 | 0 | 0 | 0 | −4 | −3 | −2 |
| G | 0 | −1 | 0 | 0 | −2 | −1 | −1 | 7 | −1 | −4 | −4 | −1 | −4 | −5 | −2 | 0 | −1 | −4 | −4 | −3 |
| H | −1 | 1 | 1 | 0 | −1 | 1 | 0 | −1 | 6 | −2 | −2 | 1 | −1 | 0 | −1 | 0 | 0 | −1 | 2 | −2 |
| I | −1 | −2 | −3 | −4 | −1 | −2 | −3 | −4 | −2 | 4 | 3 | −2 | 2 | 1 | −3 | −2 | −1 | −2 | −1 | 3 |
| L | −1 | −2 | −3 | −4 | −2 | −2 | −3 | −4 | −2 | 3 | 4 | −2 | 3 | 2 | −2 | −2 | −1 | −1 | 0 | 2 |
| K | 0 | 3 | 1 | 0 | −3 | 2 | 1 | −1 | 1 | −2 | −2 | 3 | −1 | −3 | −1 | 0 | 0 | −4 | −2 | −2 |
| M | −1 | −2 | −2 | −3 | −1 | −1 | −2 | −4 | −1 | 2 | 3 | −1 | 4 | 2 | −2 | −1 | −1 | −1 | 0 | 2 |
| F | −2 | −3 | −3 | −4 | −1 | −3 | −4 | −5 | 0 | 1 | 2 | −3 | 2 | 7 | −4 | −3 | −2 | 4 | 5 | 0 |
| P | 0 | −1 | −1 | −1 | −3 | 0 | 0 | −2 | −1 | −3 | −2 | −1 | −2 | −4 | 8 | 0 | 0 | −5 | −3 | −2 |
| S | 1 | 0 | 1 | 0 | 0 | 0 | 0 | 0 | 0 | −2 | −2 | 0 | −1 | −3 | 0 | 2 | 2 | −3 | −2 | −1 |
| T | 1 | 0 | 0 | 0 | 0 | 0 | 0 | −1 | 0 | −1 | −1 | 0 | −1 | −2 | 0 | 2 | 2 | −4 | −2 | 0 |
| W | −4 | −2 | −4 | −5 | −1 | −3 | −4 | −4 | −1 | −2 | −1 | −4 | −1 | 4 | −5 | −3 | −4 | 14 | 4 | −3 |
| Y | −2 | −2 | −1 | −3 | 0 | −2 | −3 | −4 | 2 | −1 | 0 | −2 | 0 | 5 | −3 | −2 | −2 | 4 | 8 | −1 |
| V | 0 | −2 | −2 | −3 | 0 | −2 | −2 | −3 | −2 | 3 | 2 | −2 | 2 | 0 | −2 | −1 | 0 | −3 | −1 | 3 |

[0082] For purposes herein, a “moderately conservative” replacement is any change having a nonnegative value in the PAM250 log-likelihood matrix reproduced herein above.

[0083] As is also well known in the art, relatedness of nucleic acids can also be characterized using a functional test, the ability of the two nucleic acids to base-pair to one another at defined hybridization stringencies.

[0084] It is, therefore, another aspect of the invention to provide isolated nucleic acids not only identical in sequence to those described with particularity herein, but also to provide isolated nucleic acids (“cross-hybridizing nucleic acids”) that hybridize under high stringency conditions (as defined herein below) to all or to a portion of various of the isolated human POSHL1 nucleic acids of the present invention (“reference nucleic acids”), as well as cross-hybridizing nucleic acids that hybridize under moderate stringency conditions to all or to a portion of various of the isolated human POSHL1 nucleic acids of the present invention.

[0085] Such cross-hybridizing nucleic acids are useful, inter alia, as probes for, and to drive expression of, proteins related to the proteins of the present invention as alternative isoforms, homologues, paralogues, and orthologues. Particularly useful orthologues are those from other primate species, such as chimpanzee, rhesus macaque, monkey, baboon, orangutan, and gorilla; from rodents, such as rats, mice, guinea pigs; from lagomorphs, such as rabbits; and from domestic livestock, such as cow, pig, sheep, horse, goat and chicken.

[0086] For purposes herein, high stringency conditions are defined as aqueous hybridization (i.e., free of formamide) in 6×SSC (where 20×SSC contains 3.0 M NaCl and 0.3 M sodium citrate), 1% SDS at 65° C. for at least 8 hours, followed by one or more washes in 0.2×SSC, 0.1% SDS at 65° C. For purposes herein, moderate stringency conditions are defined as aqueous hybridization (i.e., free of formamide) in 6×SSC, 1% SDS at 65° C. for at least 8 hours, followed by one or more washes in 2×SSC, 0.1% SDS at room temperature.

[0087] The hybridizing portion of the reference nucleic acid is typically at least 15 nucleotides in length, often at least 17 nucleotides in length. Often, however, the hybridizing portion of the reference nucleic acid is at least 20 nucleotides in length, 25 nucleotides in length, and even 30 nucleotides, 35 nucleotides, 40 nucleotides, and 50 nucleotides in length. Of course, cross-hybridizing nucleic acids that hybridize to a larger portion of the reference nucleic acid—for example, to a portion of at least 50 nt, at least 100 nt, at least 150 nt, 200 nt, 250 nt, 300 nt, 350 nt, 400 nt, 450 nt, or 500 nt or more—or even to the entire length of the reference nucleic acid, are also useful.

[0088] The hybridizing portion of the cross-hybridizing nucleic acid is at least 75% identical in sequence to at least a portion of the reference nucleic acid. Typically, the hybridizing portion of the cross-hybridizing nucleic acid is at least 80%, often at least 85%, 86%, 87%, 88%, 89% or even at least 90% identical in sequence to at least a portion of the reference nucleic acid. Often, the hybridizing portion of the cross-hybridizing nucleic acid will be at least 91%, 92%, 93%, 94%, 95%, 96%, 97%, 98%, or 99% identical in sequence to at least a portion of the reference nucleic acid sequence. At times, the hybridizing portion of the cross-hybridizing nucleic acid will be at least 99.5% identical in sequence to at least a portion of the reference nucleic acid.

[0089] The invention also provides fragments of various of the isolated nucleic acids of the present invention.

[0090] By “fragments” of a reference nucleic acid is here intended isolated nucleic acids, however obtained, that have a nucleotide sequence identical to a portion of the reference nucleic acid sequence, which portion is at least 17 nucleotides and less than the entirety of the reference nucleic acid. As so defined, “fragments” need not be obtained by physical fragmentation of the reference nucleic acid, although such provenance is not thereby precluded.

[0091] In theory, an oligonucleotide of 17 nucleotides is of sufficient length as to occur at random less frequently than once in the three gigabase human genome, and thus to provide a nucleic acid probe that can uniquely identify the reference sequence in a nucleic acid mixture of genomic complexity. As is well known, further specificity can be obtained by probing nucleic acid samples of subgenomic complexity, and/or by using plural fragments as short as 17 nucleotides in length collectively to prime amplification of nucleic acids, as, e.g., by polymerase chain reaction (PCR).

[0092] As further described herein below, nucleic acid fragments that encode at least 6 contiguous amino acids (i.e., fragments of 18 nucleotides or more) are useful in directing the expression or the synthesis of peptides that have utility in mapping the epitopes of the protein encoded by the reference nucleic acid. See, e.g., Geysen et al., “Use of peptide synthesis to probe viral antigens for epitopes to a resolution of a single amino acid,” Proc. Natl. Acad. Sci. USA 81: 3998-4002 (1984); and U.S. Pat. Nos. 4,708,871 and 5,595,915, the disclosures of which are incorporated herein by reference in their entireties.

[0093] As further described herein below, fragments that encode at least 8 contiguous amino acids (i.e., fragments of 24 nucleotides or more) are useful in directing the expression or the synthesis of peptides that have utility as immunogens. See, e.g., Lerner, “Tapping the immunological repertoire to produce antibodies of predetermined specificity,” Nature 299:592-596 (1982); Shinnick et al., “Synthetic peptide immunogens as vaccines,” Annu. Rev. Microbiol. 37:425-46 (1983); Sutcliffe et al., “Antibodies that react with predetermined sites on proteins,” Science 219:660-6 (1983), the disclosures of which are incorporated herein by reference in their entireties.

[0094] The nucleic acid fragment of the present invention is thus at least 17 nucleotides in length, typically at least 18 nucleotides in length, and often at least 24 nucleotides in length. Often, the nucleic acid of the present invention is at least 25 nucleotides in length, and even 30 nucleotides, 35 nucleotides, 40 nucleotides, or 45 nucleotides in length. Of course, larger fragments having at least 50 nt, at least 100 nt, at least 150 nt, 200 nt, 250 nt, 300 nt, 350 nt, 400 nt, 450 nt, or 500 nt or more are also useful, and at times preferred.

[0095] Having been based upon the mining of genomic sequence, rather than upon surveillance of expressed message, the present invention further provides isolated genome-derived nucleic acids that include portions of the human POSHL1 gene.

[0096] The invention particularly provides genome-derived single exon probes.

[0097] As further described in commonly owned and copending U.S. patent application Ser. Nos. 09/864,761, filed May 23, 2001; 09/774,203, filed Jan. 29, 2001; and 09/632,366, filed Aug. 3, 2000, the disclosures of which are incorporated herein by reference in their entireties, “a single exon probe” comprises at least part of an exon (“reference exon”) and can hybridize detectably under high stringency conditions to transcript-derived nucleic acids that include the reference exon. The single exon probe will not, however, hybridize detectably under high stringency conditions to nucleic acids that lack the reference exon and instead consist of one or more exons that are found adjacent to the reference exon in the genome.

[0098] Genome-derived single exon probes typically further comprise, contiguous to a first end of the exon portion, a first intronic and/or intergenic sequence that is identically contiguous to the exon in the genome. Often, the genome-derived single exon probe further comprises, contiguous to a second end of the exonic portion, a second intronic and/or intergenic sequence that is identically contiguous to the exon in the genome.

[0099] The minimum length of genome-derived single exon probes is defined by the requirement that the exonic portion be of sufficient length to hybridize under high stringency conditions to transcript-derived nucleic acids. Accordingly, the exon portion is at least 17 nucleotides, typically at least 18 nucleotides, 20 nucleotides, 24 nucleotides, 25 nucleotides or even 30, 35, 40, 45, or 50 nucleotides in length, and can usefully include the entirety of the exon, up to 100 nt, 150 nt, 200 nt, 250 nt, 300 nt, 350 nt, 400 nt or even 500 nt or more in length.

[0100] The maximum length of genome-derived single exon probes is defined by the requirement that the probes contain portions of no more than one exon, that is, be unable to hybridize detectably under high stringency conditions to nucleic acids that lack the reference exon but include one or more exons that are found adjacent to the reference exon the genome.

[0101] Given variable spacing of exons through eukaryotic genomes, the maximum length of single exon probes of the present invention is typically no more than 25 kb, often no more than 20 kb, 15 kb, 10 kb or 7.5 kb, or even no more than 5 kb, 4 kb, 3 kb, or even no more than about 2.5 kb in length.

[0102] The genome-derived single exon probes of the present invention can usefully include at least a first terminal priming sequence not found in contiguity with the rest of the probe sequence in the genome, and often will contain a second terminal priming sequence not found in contiguity with the rest of the probe sequence in the genome.

[0103] The present invention also provides isolated genome-derived nucleic acids that include nucleic acid sequence elements that control transcription of the human POSHL1 gene.

[0104] With a complete draft of the human genome now available, genomic sequences that are within the vicinity of the human POSHL1 coding region (and that are additional to those described with particularity herein) can readily be obtained by PCR amplification.

[0105] The isolated nucleic acids of the present invention can be composed of natural nucleotides in native 5′-3′ phosphodiester internucleoside linkage—e.g., DNA or RNA—or can contain any or all of nonnatural nucleotide analogues, nonnative internucleoside bonds, or post-synthesis modifications, either throughout the length of the nucleic acid or localized to one or more portions thereof.

[0106] As is well known in the art, when the isolated nucleic acid is used as a hybridization probe, the range of such nonnatural analogues, nonnative internucleoside bonds, or post-synthesis modifications will be limited to those that permit sequence-discriminating basepairing of the resulting nucleic acid. When used to direct expression or RNA or protein in vitro or in vivo, the range of such nonnatural analogues, nonnative internucleoside bonds, or post-synthesis modifications will be limited to those that permit the nucleic acid to function properly as a polymerization substrate. When the isolated nucleic acid is used as a therapeutic agent, the range of such changes will be limited to those that do not confer toxicity upon the isolated nucleic acid.

[0107] For example, when desired to be used as probes, the isolated nucleic acids of the present invention can usefully include nucleotide analogues that incorporate labels that are directly detectable, such as radiolabels or fluorophores, or nucleotide analogues that incorporate labels that can be visualized in a subsequent reaction, such as biotin or various haptens.

[0108] Common radiolabeled analogues include those labeled with ³³P, ³²P, and ³⁵S, such as α-³²P-dATP, α-³²P-dCTP, α-³²P-dGTP, α-³²P-dTTP, α-³²P-3′dATP, α-³²P-ATP, α-³²P CTP, α-³²P-GTP, α-³²P-UTP, α-³⁵S-dATP, γ-³⁵S-GTP, γ-³³P-dATP, and the like.

[0109] Commercially available fluorescent nucleotide analogues readily incorporated into the nucleic acids of the present invention include Cy3-dCTP, Cy3-dUTP, Cy5-dCTP, Cy3-dUTP (Amersham Pharmacia Biotech, Piscataway, N.J., USA), fluorescein-12-dUTP, tetramethylrhodamine-6-dUTP, Texas Red®-5-dUTP, Cascade Blue®-7-dUTP, BODIPY® FL-14-dUTP, BODIPY® TMR-14-dUTP, BODIPY® TR-14-dUTP, Rhodamine Green™-5-dUTP, Oregon Green® 488-5-dUTP, Texas Red®-12-dUTP, BODIPY® 630/650-14-dUTP, BODIPY® 650/665-14-dUTP, Alexa Fluor® 488-5-dUTP, Alexa Fluor® 532-5-dUTP, Alexa Fluor® 568-5-dUTP, Alexa Fluor® 594-5-dUTP, Alexa Fluor® 546-14-dUTP, fluorescein-12-UTP, tetramethylrhodamine-6-UTP, Texas Red®-5-UTP, Cascade Blue®-7-UTP, BODIPY® FL-14-UTP, BODIPY® TMR-14-UTP, BODIPY® TR-14-UTP, Rhodamine Green™-5-UTP, Alexa Fluor® 488-5-UTP, Alexa Fluor® 546-14-UTP (Molecular Probes, Inc. Eugene, Oreg., USA).

[0110] Protocols are available for custom synthesis of nucleotides having other fluorophores. Henegariu et al., “Custom Fluorescent-Nucleotide Synthesis as an Alternative Method for Nucleic Acid Labeling,” Nature Biotechnol. 18:345-348 (2000), the disclosure of which is incorporated herein by reference in its entirety.

[0111] Haptens that are commonly conjugated to nucleotides for subsequent labeling include biotin (biotin-11-dUTP, Molecular Probes, Inc., Eugene, Oreg., USA; biotin-21-UTP, biotin-21-dUTP, Clontech Laboratories, Inc., Palo Alto, Calif., USA), digoxigenin (DIG-11-dUTP, alkali labile, DIG-11-UTP, Roche Diagnostics Corp., Indianapolis, Ind., USA), and dinitrophenyl (dinitrophenyl-11-dUTP, Molecular Probes, Inc., Eugene, Oreg., USA).

[0112] As another example, when desired to be used for antisense inhibition of transcription or translation, the isolated nucleic acids of the present invention can usefully include altered, often nuclease-resistant, internucleoside bonds. See Hartmann et al. (eds.), Manual of Antisense Methodology (Perspectives in Antisense Science), Kluwer Law International (1999) (ISBN:079238539X); Stein et al. (eds.), Applied Antisense Oligonucleotide Technology, Wiley-Liss (cover (1998) (ISBN: 0471172790); Chadwick et al. (eds.), Oligonucleotides as Therapeutic Agents—Symposium No. 209, John Wiley & Son Ltd (1997) (ISBN: 0471972797), the disclosures of which are incorporated herein by reference in their entireties. Such altered internucloside bonds are often desired also when the isolated nucleic acid of the present invention is to be used for targeted gene correction, Gamper et al., Nucl. Acids Res. 28(21) :4332-4339 (2000), the disclosures of which are incorporated herein by reference in its entirety.

[0113] Modified oligonucleotide backbones often preferred when the nucleic acid is to be used for antisense purposes are, for example, phosphorothioates, chiral phosphorothioates, phosphorodithioates, phosphotriesters, aminoalkylphosphotriesters, methyl and other alkyl phosphonates including 3′-alkylene phosphonates and chiral phosphonates, phosphinates, phosphoramidates including 3′-amino phosphoramidate and aminoalkylphosphoramidates, thionophosphoramidates, thionoalkylphosphonates, thionoalkylphosphotriesters, and boranophosphates having normal 3′-5′ linkages, 2′-5′ linked analogs of these, and those having inverted polarity wherein the adjacent pairs of nucleoside units are linked 3′-5′ to 5′-3′ or 2′-5′ to 5′-2′. Representative U.S. patents that teach the preparation of the above phosphorus-containing linkages include, but are not limited to, U.S. Pat. Nos. 3,687,808; 4,469,863; 4,476,301; 5,023,243; 5,177,196; 5,188,897; 5,264,423; 5,276,019; 5,278,302; 5,286,717; 5,321,131; 5,399,676; 5,405,939; 5,453,496; 5,455,233; 5,466,677; 5,476,925; 5,519,126; 5,536,821; 5,541,306; 5,550,111; 5,563,253; 5,571,799; 5,587,361; and 5,625,050, the disclosures of which are incorporated herein by reference in their entireties.

[0114] Preferred modified oligonucleotide backbones for antisense use that do not include a phosphorus atom have backbones that are formed by short chain alkyl or cycloalkyl internucleoside linkages, mixed heteroatom and alkyl or cycloalkyl internucleoside linkages, or one or more short chain heteroatomic or heterocyclic internucleoside linkages. These include those having morpholino linkages (formed in part from the sugar portion of a nucleoside); siloxane backbones; sulfide, sulfoxide and sulfone backbones; formacetyl and thioformacetyl backbones; methylene formacetyl and thioformacetyl backbones; alkene containing backbones; sulfamate backbones; methyleneimino and methylenehydrazino backbones; sulfonate and sulfonamide backbones; amide backbones; and others having mixed N, O, S and CH₂ component parts. Representative U.S. patents that teach the preparation of the above backbones include, but are not limited to, U.S. Pat. Nos. 5,034,506; 5,166,315; 5,185,444; 5,214,134; 5,216,141; 5,235,033; 5,264,562; 5,264,564; 5,405,938; 5,434,257; 5,466,677; 5,470,967; 5,489,677; 5,541,307; 5,561,225; 5,596,086; 5,602,240; 5,610,289; 5,602,240; 5,608,046; 5,610,289; 5,618,704; 5,623,070; 5,663,312; 5,633,360; 5,677,437; and 5,677,439, the disclosures of which are incorporated herein by reference in their entireties.

[0115] In other preferred oligonucleotide mimetics, both the sugar and the internucleoside linkage are replaced with novel groups, such as peptide nucleic acids (PNA).

[0116] In PNA compounds, the phosphodiester backbone of the nucleic acid is replaced with an amide-containing backbone, in particular by repeating N-(2-aminoethyl) glycine units linked by amide bonds. Nucleobases are bound directly or indirectly to aza nitrogen atoms of the amide portion of the backbone, typically by methylene carbonyl linkages.

[0117] The uncharged nature of the PNA backbone provides PNA/DNA and PNA/RNA duplexes with a higher thermal stability than is found in DNA/DNA and DNA/RNA duplexes, resulting from the lack of charge repulsion between the PNA and DNA or RNA strand. In general, the Tm of a PNA/DNA or PNA/RNA duplex is 1° C. higher per base pair than the Tm of the corresponding DNA/DNA or DNA/RNA duplex (in 100 mM NaCl).

[0118] The neutral backbone also allows PNA to form stable DNA duplexes largely independent of salt concentration. At low ionic strength, PNA can be hybridized to a target sequence at temperatures that make DNA hybridization problematic or impossible. And unlike DNA/DNA duplex formation, PNA hybridization is possible in the absence of magnesium. Adjusting the ionic strength, therefore, is useful if competing DNA or RNA is present in the sample, or if the nucleic acid being probed contains a high level of secondary structure.

[0119] PNA also demonstrates greater specificity in binding to complementary DNA. A PNA/DNA mismatch is more destabilizing than DNA/DNA mismatch. A single mismatch in mixed a PNA/DNA 15-mer lowers the Tm by 8-20° C. (15° C. on average). In the corresponding DNA/DNA duplexes, a single mismatch lowers the Tm by 4-16° C. (11° C. on average). Because PNA probes can be significantly shorter than DNA probes, their specificity is greater.

[0120] Additionally, nucleases and proteases do not recognize the PNA polyamide backbone with nucleobase sidechains. As a result, PNA oligomers are resistant to degradation by enzymes, and the lifetime of these compounds is extended both in vivo and in vitro. In addition, PNA is stable over a wide pH range.

[0121] Because its backbone is formed from amide bonds, PNA can be synthesized using a modified peptide synthesis protocol. PNA oligomers can be synthesized by both Fmoc and tBoc methods. Representative U.S. patents that teach the preparation of PNA compounds include, but are not limited to, U.S. Pat. Nos. 5,539,082; 5,714,331; and 5,719,262, each of which is herein incorporated by reference; automated PNA synthesis is readily achievable on commercial synthesizers (see, e.g., “PNA User's Guide,” Rev. 2, February 1998, Perseptive Biosystems Part No. 60138, Applied Biosystems, Inc., Foster City, Calif.).

[0122] PNA chemistry and applications are reviewed, inter alia, in Ray et al., FASEB J. 14(9) :1041-60 (2000); Nielsen et al., Pharmacol Toxicol. 86(1) :3-7 (2000); Larsen et al., Biochim Biophys Acta. 1489(1) :159-66 (1999); Nielsen, Curr. Opin. Struct. Biol. 9(3) :353-7 (1999), and Nielsen, Curr. Opin. Biotechnol. 10(1) :71-5 (1999), the disclosures of which are incorporated herein by reference in their entireties.

[0123] Differences from nucleic acid compositions found in nature—e.g., nonnative bases, altered internucleoside linkages, post-synthesis modification—can be present throughout the length of the nucleic acid or can, instead, usefully be localized to discrete portions thereof. As an example of the latter, chimeric nucleic acids can be synthesized that have discrete DNA and RNA domains and demonstrated utility for targeted gene repair, as further described in U.S. Pat. Nos. 5,760,012 and 5,731,181, the disclosures of which are incorporated herein by reference in their entireties. As another example, chimeric nucleic acids comprising both DNA and PNA have been demonstrated to have utility in modified PCR reactions. See Misra et al., Biochem. 37: 1917-1925 (1998); see also Finn et al., Nucl. Acids Res. 24: 3357-3363 (1996), incorporated herein by reference.

[0124] Unless otherwise specified, nucleic acids of the present invention can include any topological conformation appropriate to the desired use; the term thus explicitly comprehends, among others, single-stranded, double-stranded, triplexed, quadruplexed, partially double-stranded, partially-triplexed, partially-quadruplexed, branched, hairpinned, circular, and padlocked conformations. Padlock conformations and their utilities are further described in Banér et al., Curr. Opin. Biotechnol. 12:11-15 (2001); Escude et al., Proc. Natl. Acad. Sci. USA 14;96(19) :10603-7 (1999); Nilsson et al., Science 265(5181) :2085-8 (1994), the disclosures of which are incorporated herein by reference in their entireties. Triplex and quadruplex conformations, and their utilities, are reviewed in Praseuth et al., Biochim. Biophys. Acta. 1489 (1) :181-206 (1999); Fox, Curr. Med. Chem. 7(1) :17-37 (2000); Kochetkova et al., Methods Mol. Biol. 130:189-201 (2000); Chan et al., J. Mol. Med. 75(4) :267-82 (1997), the disclosures of which are incorporated herein by reference in their entireties.

[0125] The nucleic acids of the present invention can be detectably labeled.

[0126] Commonly-used labels include radionuclides, such as ³²P, ³³P, 35S, ³H (and for NMR detection, ¹³C and ¹⁵N), haptens that can be detected by specific antibody or high affinity binding partner (such as avidin), and fluorophores.

[0127] As noted above, detectable labels can be incorporated by inclusion of labeled nucleotide analogues in the nucleic acid. Such analogues can be incorporated by enzymatic polymerization, such as by nick translation, random priming, polymerase chain reaction (PCR), terminal transferase tailing, and end-filling of overhangs, for DNA molecules, and in vitro transcription driven, e.g., from phage promoters, such as T7, T3, and SP6, for RNA molecules. Commercial kits are readily available for each such labeling approach.

[0128] Analogues can also be incorporated during automated solid phase chemical synthesis.

[0129] As is well known, labels can also be incorporated after nucleic acid synthesis, with the 5′ phosphate and 3′ hydroxyl providing convenient sites for post-synthetic covalent attachment of detectable labels.

[0130] Various other post-synthetic approaches permit internal labeling of nucleic acids.

[0131] For example, fluorophores can be attached using a cisplatin reagent that reacts with the N7 of guanine residues (and, to a lesser extent, adenine bases) in DNA, RNA, and PNA to provide a stable coordination complex between the nucleic acid and fluorophore label (Universal Linkage System) (available from Molecular Probes, Inc., Eugene, Oreg., USA and Amersham Pharmacia Biotech, Piscataway, N.J., USA); see Alers et al., Genes, Chromosomes & Cancer, Vol. 25, pp. 301-305 (1999); Jelsma et al., J. NIH Res. 5:82 (1994); Van Belkum et al., BioTechniques 16:148-153 (1994), incorporated herein by reference. As another example, nucleic acids can be labeled using a disulfide-containing linker (FastTag™ Reagent, Vector Laboratories, Inc., Burlingame, Calif., USA) that is photo- or thermally coupled to the target nucleic acid using aryl azide chemistry; after reduction, a free thiol is available for coupling to a hapten, fluorophore, sugar, affinity ligand, or other marker.

[0132] Multiple independent or interacting labels can be incorporated into the nucleic acids of the present invention.

[0133] For example, both a fluorophore and a moiety that in proximity thereto acts to quench fluorescence can be included to report specific hybridization through release of fluorescence quenching, Tyagi et al., Nature Biotechnol. 14: 303-308 (1996); Tyagi et al., Nature Biotechnol. 16, 49-53 (1998); Sokol et al., Proc. Natl. Acad. Sci. USA 95: 11538-11543 (1998); Kostrikis et al., Science 279:1228-1229 (1998); Marras et al., Genet. Anal. 14: 151-156 (1999); U.S. Pat. Nos. 5,846,726, 5,925,517, 5925517, or to report exonucleotidic excision, U.S. Pat. No. 5,538,848; Holland et al., Proc. Natl. Acad. Sci. USA 88:7276-7280 (1991); Heid et al., Genome Res. 6(10) :986-94 (1996); Kuimelis et al., Nucleic Acids Symp Ser. (37) :255-6 (1997); U.S. Pat. No. 5,723,591, the disclosures of which are incorporated herein by reference in their entireties.

[0134] So labeled, the isolated nucleic acids of the present invention can be used as probes, as further described below.

[0135] Nucleic acids of the present invention can also usefully be bound to a substrate. The substrate can porous or solid, planar or non-planar, unitary or distributed; the bond can be covalent or noncovalent. Bound to a substrate, nucleic acids of the present invention can be used as probes in their unlabeled state.

[0136] For example, the nucleic acids of the present invention can usefully be bound to a porous substrate, commonly a membrane, typically comprising nitrocellulose, nylon, or positively-charged derivatized nylon; so attached, the nucleic acids of the present invention can be used to detect human POSHL1 nucleic acids present within a labeled nucleic acid sample, either a sample of genomic nucleic acids or a sample of transcript-derived nucleic acids, e.g. by reverse dot blot.

[0137] The nucleic acids of the present invention can also usefully be bound to a solid substrate, such as glass, although other solid materials, such as amorphous silicon, crystalline silicon, or plastics, can also be used. Such plastics include polymethylacrylic, polyethylene, polypropylene, polyacrylate, polymethylmethacrylate, polyvinylchloride, polytetrafluoroethylene, polystyrene, polycarbonate, polyacetal, polysulfone, celluloseacetate, cellulosenitrate, nitrocellulose, or mixtures thereof.

[0138] Typically, the solid substrate will be rectangular, although other shapes, particularly disks and even spheres, present certain advantages. Particularly advantageous alternatives to glass slides as support substrates for array of nucleic acids are optical discs, as described in Demers, “Spatially Addressable Combinatorial Chemical Arrays in CD-ROM Format,” international patent publication WO 98/12559, incorporated herein by reference in its entirety.

[0139] The nucleic acids of the present invention can be attached covalently to a surface of the support substrate or applied to a derivatized surface in a chaotropic agent that facilitates denaturation and adherence by presumed noncovalent interactions, or some combination thereof.

[0140] The nucleic acids of the present invention can be bound to a substrate to which a plurality of other nucleic acids are concurrently bound, hybridization to each of the plurality of bound nucleic acids being separately detectable. At low density, e.g. on a porous membrane, these substrate-bound collections are typically denominated macroarrays; at higher density, typically on a solid support, such as glass, these substrate bound collections of plural nucleic acids are colloquially termed microarrays. As used herein, the term microarray includes arrays of all densities. It is, therefore, another aspect of the invention to provide microarrays that include the nucleic acids of the present invention.

[0141] The isolated nucleic acids of the present invention can be used as hybridization probes to detect, characterize, and quantify human POSHL1 nucleic acids in, and isolate human POSHL1 nucleic acids from, both genomic and transcript-derived nucleic acid samples. When free in solution, such probes are typically, but not invariably, detectably labeled; bound to a substrate, as in a microarray, such probes are typically, but not invariably unlabeled.

[0142] For example, the isolated nucleic acids of the present invention can be used as probes to detect and characterize gross alterations in the human POSHL1 genomic locus, such as deletions, insertions, translocations, and duplications of the human POSHL1 genomic locus through fluorescence in situ hybridization (FISH) to chromosome spreads. See, e.g., Andreeff et al. (eds.), Introduction to Fluorescence In Situ Hybridization: Principles and Clinical Applications, John Wiley & Sons (1999) (ISBN: 0471013455), the disclosure of which is incorporated herein by reference in its entirety. The isolated nucleic acids of the present invention can be used as probes to assess smaller genomic alterations using, e.g., Southern blot detection of restriction fragment length polymorphisms. The isolated nucleic acids of the present invention can be used as probes to isolate genomic clones that include the nucleic acids of the present invention, which thereafter can be restriction mapped and sequenced to identify deletions, insertions, translocations, and substitutions (single nucleotide polymorphisms, SNPs) at the sequence level.

[0143] The isolated nucleic acids of the present invention can also be used as probes to detect, characterize, and quantify human POSHL1 nucleic acids in, and isolate human POSHL1 nucleic acids from, transcript-derived nucleic acid samples.

[0144] For example, the isolated nucleic acids of the present invention can be used as hybridization probes to detect, characterize by length, and quantify human POSHL1 mRNA by northern blot of total or poly-A⁺- selected RNA samples. For example, the isolated nucleic acids of the present invention can be used as hybridization probes to detect, characterize by location, and quantify human POSHL1 message by in situ hybridization to tissue sections (see, e.g., Schwarchzacher et al., In Situ Hybridization, Springer-Verlag New York (2000) (ISBN: 0387915966), the disclosure of which is incorporated herein by reference in its entirety). For example, the isolated nucleic acids of the present invention can be used as hybridization probes to measure the representation of human POSHL1 clones in a cDNA library. For example, the isolated nucleic acids of the present invention can be used as hybridization probes to isolate human POSHL1 nucleic acids from cDNA libraries, permitting sequence level characterization of human POSHL1 messages, including identification of deletions, insertions, truncations—including deletions, insertions, and truncations of exons in alternatively spliced forms—and single nucleotide polymorphisms.

[0145] All of the aforementioned probe techniques are well within the skill in the art, and are described at greater length in standard texts such as Sambrook et al., Molecular Cloning: A Laboratory Manual (3^{rd} ed.), Cold Spring Harbor Laboratory Press (2001) (ISBN: 0879695773); Ausubel et al. (eds.), Short Protocols in Molecular Biology: A Compendium of Methods from Current Protocols in Molecular Biology (4^{th} ed.), John Wiley & Sons, 1999 (ISBN: 047132938X); and Walker et al. (eds.), The Nucleic Acids Protocols Handbook, Humana Press (2000) (ISBN: 0896034593), the disclosures of which are incorporated herein by reference in their entirety.

[0146] As described in the Examples herein below, the nucleic acids of the present invention can also be used to detect and quantify human POSHL1 nucleic acids in transcript-derived samples—that is, to measure expression of the human POSHL1 gene—when included in a microarray. Measurement of human POSHL1 expression has particular utility in the diagnosis and treatment of cancer, as further described in the Examples herein below.

[0147] As would be readily apparent to one of skill in the art, each human POSHL1 nucleic acid probe—whether labeled, substrate-bound, or both—is thus currently available for use as a tool for measuring the level of human POSHL1 expression in each of the tissues in which expression has already been confirmed, notably adult liver, fetal liver, brain, lung, placenta, bone marrow, prostate, kidney, testis, adrenal gland and skeletal muscle. The utility is specific to the probe: under high stringency conditions, the probe reports the level of expression of message specifically containing that portion of the human POSHL1 gene included within the probe.

[0148] Measuring tools are well known in many arts, not just in molecular biology, and are known to possess credible, specific, and substantial utility. For example, U.S. Pat. No. 6,016,191 describes and claims a tool for measuring characteristics of fluid flow in a hydrocarbon well; U.S. Pat. No. 6,042,549 describes and claims a device for measuring exercise intensity; U.S. Pat. No. 5,889,351 describes and claims a device for measuring viscosity and for measuring characteristics of a fluid; U.S. Pat. No. 5,570,694 describes and claims a device for measuring blood pressure; U.S. Pat. No. 5,930,143 describes and claims a device for measuring the dimensions of machine tools; U.S. Pat. No. 5,279,044 describes and claims a measuring device for determining an absolute position of a movable element; U.S. Pat. No. 5,186,042 describes and claims a device for measuring action force of a wheel; and U.S. Pat. No. 4,246,774 describes and claims a device for measuring the draft of smoking articles such as cigarettes.

[0149] As for tissues not yet demonstrated to express human POSHL1, the human POSHL1 nucleic acid probes of the present invention are currently available as tools for surveying such tissues to detect the presence of human POSHL1 nucleic acids.

[0150] Survey tools—i.e., tools for determining the presence and/or location of a desired object by search of an area—are well known in many arts, not just in molecular biology, and are known to possess credible, specific, and substantial utility. For example, U.S. Pat. No. 6,046,800 describes and claims a device for surveying an area for objects that move; U.S. Pat. No. 6,025,201 describes and claims an apparatus for locating and discriminating platelets from non-platelet particles or cells on a cell-by-cell basis in a whole blood sample; U.S. Pat. No. 5,990,689 describes and claims a device for detecting and locating anomalies in the electromagnetic protection of a system; U.S. Pat. No. 5,984,175 describes and claims a device for detecting and identifying wearable user identification units; U.S. Pat. No. 3,980,986 (“Oil well survey tool”), describes and claims a tool for finding the position of a drill bit working at the bottom of a borehole.

[0151] As noted above, the nucleic acid probes of the present invention are useful in constructing microarrays; the microarrays, in turn, are products of manufacture that are useful for measuring and for surveying gene expression.

[0152] When included on a microarray, each human POSHL1 nucleic acid probe makes the microarray specifically useful for detecting that portion of the human POSHL1 gene included within the probe, thus imparting upon the microarray device the ability to detect a signal where, absent such probe, it would have reported no signal. This utility makes each individual probe on such microarray akin to an antenna, circuit, firmware or software element included in an electronic apparatus, where the antenna, circuit, firmware or software element imparts upon the apparatus the ability newly and additionally to detect signal in a portion of the radio-frequency spectrum where previously it could not; such devices are known to have specific, substantial, and credible utility.

[0153] Changes in the level of expression need not be observed for the measurement of expression to have utility.

[0154] For example, where gene expression analysis is used to assess toxicity of chemical agents on cells, the failure of the agent to change a gene's expression level is evidence that the drug likely does not affect the pathway of which the gene's expressed protein is a part. Analogously, where gene expression analysis is used to assess side effects of pharmacologic agents—whether in lead compound discovery or in subsequent screening of lead compound derivatives—the inability of the agent to alter a gene's expression level is evidence that the drug does not affect the pathway of which the gene's expressed protein is a part.

[0155] WO 99/58720, incorporated herein by reference in its entirety, provides methods for quantifying the relatedness of a first and second gene expression profile and for ordering the relatedness of a plurality of gene expression profiles, without regard to the identity or function of the genes whose expression is used in the calculation.

[0156] Gene expression analysis, including gene expression analysis by microarray hybridization, is, of course, principally a laboratory-based art. Devices and apparatus used principally in laboratories to facilitate laboratory research are well-established to possess specific, substantial, and credible utility. For example, U.S. Pat. No. 6,001,233 describes and claims a gel electrophoresis apparatus having a cam-activated clamp; for example, U.S. Pat. No. 6,051,831 describes and claims a high mass detector for use in time-of-flight mass spectrometers; for example, U.S. Pat. No. 5,824,269 describes and claims a flow cytometer-as is well known, few gel electrophoresis apparatuses, TOF-MS devices, or flow cytometers are sold for consumer use.

[0157] Indeed, and in particular, nucleic acid microarrays, as devices intended for laboratory use in measuring gene expression, are well-established to have specific, substantial and credible utility. Thus, the microarrays of the present invention have at least the specific, substantial and credible utilities of the microarrays claimed as devices and articles of manufacture in the following U.S. patents, the disclosures of each of which is incorporated herein by reference: U.S. Pat. No. 5,445,934 (“Array of oligonucleotides on a solid substrate”); U.S. Pat. No. 5,744,305 (“Arrays of materials attached to a substrate”); and U.S. Pat. No. 6,004,752 (“Solid support with attached molecules”).

[0158] Genome-derived single exon probes and genome-derived single exon probe microarrays have the additional utility, inter alia, of permitting high-throughput detection of splice variants of the nucleic acids of the present invention, as further described in copending and commonly owned U.S. patent application No. 09/632,366, filed Aug. 3, 2000, the disclosure of which is incorporated herein by reference in its entirety.

[0159] The isolated nucleic acids of the present invention can also be used to prime synthesis of nucleic acid, for purpose of either analysis or isolation, using mRNA, cDNA, or genomic DNA as template.

[0160] For use as primers, at least 17 contiguous nucleotides of the isolated nucleic acids of the present invention will be used. Often, at least 18, 19, or 20 contiguous nucleotides of the nucleic acids of the present invention will be used, and on occasion at least 20, 22, 24, or 25 contiguous nucleotides of the nucleic acids of the present invention will be used, and even 30 nucleotides or more of the nucleic acids of the present invention can be used to prime specific synthesis.

[0161] The nucleic acid primers of the present invention can be used, for example, to prime first strand cDNA synthesis on an mRNA template.

[0162] Such primer extension can be done directly to analyze the message. Alternatively, synthesis on an mRNA template can be done to produce first strand cDNA. The first strand cDNA can thereafter be used, inter alia, directly as a single-stranded probe, as above-described, as a template for sequencing—permitting identification of alterations, including deletions, insertions, and substitutions, both normal allelic variants and mutations associated with abnormal phenotypes—or as a template, either for second strand cDNA synthesis (e.g., as an antecedent to insertion into a cloning or expression vector), or for amplification.

[0163] The nucleic acid primers of the present invention can also be used, for example, to prime single base extension (SBE) for SNP detection (see, e.g., U.S. Pat. No. 6,004,744, the disclosure of which is incorporated herein by reference in its entirety).

[0164] As another example, the nucleic acid primers of the present invention can be used to prime amplification of human POSHL1 nucleic acids, using transcript-derived or genomic DNA as template.

[0165] Primer-directed amplification methods are now well-established in the art. Methods for performing the polymerase chain reaction (PCR) are compiled, inter alia, in McPherson, PCR (Basics: From Background to Bench), Springer Verlag (2000) (ISBN: 0387916008); Innis et al. (eds.), PCR Applications: Protocols for Functional Genomics, Academic Press (1999) (ISBN: 0123721857); Gelfand et al. (eds.), PCR Strategies, Academic Press (1998) (ISBN: 0123721822); Newton et al., PCR, Springer-Verlag New York (1997) (ISBN: 0387915060); Burke (ed.), PCR: Essential Techniques, John Wiley & Son Ltd (1996) (ISBN: 047195697X); White (ed.), PCR Cloning Protocols: From Molecular Cloning to Genetic Engineering, Vol. 67, Humana Press (1996) (ISBN: 0896033430); McPherson et al. (eds.), PCR 2: A Practical Approach, Oxford University Press, Inc. (1995) (ISBN: 0199634254), the disclosures of which are incorporated herein by reference in their entireties. Methods for performing RT-PCR are collected, e.g., in Siebert et al. (eds.), Gene Cloning and Analysis by RT-PCR, Eaton Publishing Company/Bio Techniques Books Division, 1998 (ISBN: 1881299147); Siebert (ed.), PCR Technique:RT-PCR, Eaton Publishing Company/BioTechniques Books (1995) (ISBN:1881299139), the disclosure of which is incorporated herein by reference in its entirety.

[0166] Isothermal amplification approaches, such as rolling circle amplification, are also now well-described. See, e.g., Schweitzer et al., Curr. Opin. Biotechnol. 12(1) :21-7 (2001); U.S. Pat. Nos. 6,235,502, 6,221,603, 6,210,884, 6,183,960, 5,854,033, 5,714,320, 5,648,245, and international patent publications WO 97/19193 and WO 00/15779, the disclosures of which are incorporated herein by reference in their entireties. Rolling circle amplification can be combined with other techniques to facilitate SNP detection. See, e.g., Lizardi et al., Nature Genet. 19(3) :225-32 (1998).

[0167] As further described below, nucleic acids of the present invention, inserted into vectors that flank the nucleic acid insert with a phage promoter, such as T7, T3, or SP6 promoter, can be used to drive in vitro expression of RNA complementary to either strand of the nucleic acid of the present invention. The RNA can be used, inter alia, as a single-stranded probe, in cDNA-mRNA subtraction, or for in vitro translation.

[0168] As will be further discussed herein below, nucleic acids of the present invention that encode human POSHL1 protein or portions thereof can be used, inter alia, to express the human POSHL1 proteins or protein fragments, either alone, or as part of fusion proteins.

[0169] Expression can be from genomic nucleic acids of the present invention, or from transcript-derived nucleic acids of the present invention.

[0170] Where protein expression is effected from genomic DNA, expression will typically be effected in eukaryotic, typically mammalian, cells capable of splicing introns from the initial RNA transcript. Expression can be driven from episomal vectors, such as EBV-based vectors, or can be effected from genomic DNA integrated into a host cell chromosome. As will be more fully described below, where expression is from transcript-derived (or otherwise intron-less) nucleic acids of the present invention, expression can be effected in wide variety of prokaryotic or eukaryotic cells.

[0171] Expressed in vitro, the protein, protein fragment, or protein fusion can thereafter be isolated, to be used, inter alia, as a standard in immunoassays specific for the proteins, or protein isoforms, of the present invention; to be used as a therapeutic agent, e.g., to be administered as passive replacement therapy in individuals deficient in the proteins of the present invention, or to be administered as a vaccine; to be used for in vitro production of specific antibody, the antibody thereafter to be used, e.g., as an analytical reagent for detection and quantitation of the proteins of the present invention or to be used as an immunotherapeutic agent.

[0172] The isolated nucleic acids of the present invention can also be used to drive in vivo expression of the proteins of the present invention. In vivo expression can be driven from a vector—typically a viral vector, often a vector based upon a replication incompetent retrovirus, an adenovirus, or an adeno-associated virus (AAV)—for purpose of gene therapy. In vivo expression can also be driven from signals endogenous to the nucleic acid or from a vector, often a plasmid vector, such as pVAX1 (Invitrogen, Carlsbad Calif., USA), for purpose of “naked” nucleic acid vaccination, as further described in U.S. Pat. Nos. 5,589,466; 5,679,647; 5,804,566; 5,830,877; 5,843,913; 5,880,104; 5,958,891; 5,985,847; 6,017,897; 6,110,898; 6,204,250, the disclosures of which are incorporated herein by reference in their entireties.

[0173] The nucleic acids of the present invention can also be used for antisense inhibition of transcription or translation. See Phillips (ed.), Antisense Technology, Part B, Methods in Enzymology Vol. 314, Academic Press, Inc. (1999) (ISBN: 012182215X); Phillips (ed.), Antisense Technology, Part A, Methods in Enzymology Vol. 313, Academic Press, Inc. (1999) (ISBN: 0121822141); Hartmann et al. (eds.), Manual of Antisense Methodology (Perspectives in Antisense Science), Kluwer Law International (1999) (ISBN:079238539X); Stein et al. (eds.), Applied Antisense Oligonucleotide Technology, Wiley-Liss (cover (1998) (ISBN: 0471172790); Agrawal et al. (eds.), Antisense Research and Application, Springer-Verlag New York, Inc. (1998) (ISBN: 3540638334); Lichtenstein et al. (eds.), Antisense Technology: A Practical Approach, Vol. 185, Oxford University Press, INC. (1998) (ISBN: 0199635838); Gibson (ed.), Antisense and Ribozyme Methodology: Laboratory Companion, Chapman & Hall (1997) (ISBN: 3826100794); Chadwick et al. (eds.), Oligonucleotides as Therapeutic Agents—Symposium No. 209, John Wiley & Son Ltd (1997) (ISBN: 0471972797), the disclosures of which are incorporated herein by reference in their entireties.

[0174] Nucleic acids of the present invention, particularly cDNAs of the present invention, that encode full-length human POSHL1 protein isoforms, have additional, well-recognized, immediate, real world utility as commercial products of manufacture suitable for sale.

[0175] For example, Invitrogen Corp. (Carlsbad, Calif., USA), through its Research Genetics subsidiary, sells full length human cDNAs cloned into one of a selection of expression vectors as GeneStorm® expression-ready clones; utility is specific for the gene, since each gene is capable of being ordered separately and has a distinct catalogue number, and utility is substantial, each clone selling for $650.00 US. Similarly, Incyte Genomics (Palo Alto, Calif., USA) sells clones from public and proprietary sources in multi-well plates or individual tubes.

[0176] Nucleic acids of the present invention that include genomic regions encoding the human POSHL1 protein, or portions thereof, have yet further utilities.

[0177] For example, genomic nucleic acids of the present invention can be used as amplification substrates, e.g. for preparation of genome-derived single exon probes of the present invention, as described above and in copending and commonly-owned U.S. patent application Ser. No. 09/864,761, filed May 23, 2001, Ser. No. 09/774,203, filed Jan. 29, 2001, and Ser. No. 09/632,366, filed Aug. 3, 2000, the disclosures of which are incorporated herein by reference in their entireties.

[0178] As another example, genomic nucleic acids of the present invention can be integrated non-homologously into the genome of somatic cells, e.g. CHO cells, COS cells, or 293 cells, with or without amplification of the insertional locus, in order, e.g., to create stable cell lines capable of producing the proteins of the present invention.

[0179] As another example, more fully described herein below, genomic nucleic acids of the present invention can be integrated nonhomologously into embryonic stem (ES) cells to create transgenic non-human animals capable of producing the proteins of the present invention.

[0180] Genomic nucleic acids of the present invention can also be used to target homologous recombination to the human POSHL1 locus. See, e.g., U.S. Pat. Nos. 6,187,305; 6,204,061; 5,631,153; 5,627,059; 5,487,992; 5,464,764; 5,614,396; 5,527,695 and 6,063,630; and Kmiec et al. (eds.), Gene Targeting Protocols, Vol. 133, Humana Press (2000) (ISBN: 0896033600); Joyner (ed.), Gene Targeting: A Practical Approach, Oxford University Press, Inc. (2000) (ISBN: 0199637938); Sedivy et al., Gene Targeting, Oxford University Press (1998) (ISBN: 071677013X); Tymms et al. (eds.), Gene Knockout Protocols, Humana Press (2000) (ISBN: 0896035727); Mak et al. (eds.), The Gene Knockout FactsBook, Vol. 2, Academic Press, Inc. (1998) (ISBN: 0124660444); Torres et al., Laboratory Protocols for Conditional Gene Targeting, Oxford University Press (1997) (ISBN: 019963677X); Vega (ed.), Gene Targeting, CRC Press, LLC (1994) (ISBN: 084938950X), the disclosures of which are incorporated herein by reference in their entireties.

[0181] Where the genomic region includes transcription regulatory elements, homologous recombination can be used to alter the expression of human POSHL1, both for purpose of in vitro production of human POSHL1 protein from human cells, and for purpose of gene therapy. See, e.g., U.S. Pat. Nos. 5,981,214, 6,048,524; 5,272,071.

[0182] Fragments of the nucleic acids of the present invention smaller than those typically used for homologous recombination can also be used for targeted gene correction or alteration, possibly by cellular mechanisms different from those engaged during homologous recombination.

[0183] For example, partially duplexed RNA/DNA chimeras have been shown to have utility in targeted gene correction, U.S. Pat. Nos. 5,945,339, 5,888,983, 5,871,984, 5,795,972, 5,780,296, 5,760,012, 5,756,325, 5,731,181, the disclosures of which are incorporated herein by reference in their entireties. So too have small oligonucleotides fused to triplexing domains have been shown to have utility in targeted gene correction, Culver et al., “Correction of chromosomal point mutations in human cells with bifunctional oligonucleotides,” Nature Biotechnol. 17(10) :989-93 (1999), as have oligonucleotides having modified terminal bases or modified terminal internucleoside bonds, Gamper et al., Nucl. Acids Res. 28(21) :4332-9 (2000), the disclosures of which are incorporated herein by reference.

[0184] The isolated nucleic acids of the present invention can also be used to provide the initial substrate for recombinant engineering of human POSHL1 protein variants having desired phenotypic improvements. Such engineering includes, for example, site-directed mutagenesis, random mutagenesis with subsequent functional screening, and more elegant schemes for recombinant evolution of proteins, as are described, inter alia, in U.S. Pat. Nos. 6,180,406; 6,165,793; 6,117,679; and 6,096,548, the disclosures of which are incorporated herein by reference in their entireties.

[0185] Nucleic acids of the present invention can be obtained by using the labeled probes of the present invention to probe nucleic acid samples, such as genomic libraries, cDNA libraries, and mRNA samples, by standard techniques. Nucleic acids of the present invention can also be obtained by amplification, using the nucleic acid primers of the present invention, as further demonstrated in Example 1, herein below. Nucleic acids of the present invention of fewer than about 100 nt can also be synthesized chemically, typically by solid phase synthesis using commercially available automated synthesizers.

### “Full Length” Human POSHL1 Nucleic Acids

[0186] In a first series of nucleic acid embodiments, the invention provides isolated nucleic acids that encode the entirety of the human POSHL1 protein. As discussed above, the “full-length” nucleic acids of the present invention can be used, inter alia, to express full length human POSHL1 protein. The full-length nucleic acids can also be used as nucleic acid probes; used as probes, the isolated nucleic acids of these embodiments will hybridize to human POSHL1.

[0187] In a first such embodiment, the invention provides an isolated nucleic acid comprising (i) the nucleotide sequence of SEQ ID NO: 1, or (ii) the complement of (i). SEQ ID NO: 1 presents the entire cDNA of human POSHL1, including the 5′ untranslated (UT) region and 3′ UT.

[0188] In a second embodiment, the invention provides an isolated nucleic acid comprising (i) the nucleotide sequence of SEQ ID NO: 2, (ii) a degenerate variant of the nucleotide sequence of SEQ ID NO: 2, or (iii) the complement of (i) or (ii). SEQ ID NO: 2 presents the open reading frame (ORF) from SEQ ID NO: 1.

[0189] In a third embodiment, the invention provides an isolated nucleic acid comprising (i) a nucleotide sequence that encodes a polypeptide with the amino acid sequence of SEQ ID NO: 3 or (ii) the complement of a nucleotide sequence that encodes a polypeptide with the amino acid sequence of SEQ ID NO: 3. SEQ ID NO: 3 provides the amino acid sequence of human POSHL1.

[0190] In a fourth embodiment, the invention provides an isolated nucleic acid having a nucleotide sequence that (i) encodes a polypeptide having the sequence of SEQ ID NO: 3, (ii) encodes a polypeptide having the sequence of SEQ ID NO 3 with conservative amino acid substitutions, or (iii) that is the complement of (i) or (ii), where SEQ ID NO: 3 provides the amino acid sequence of human POSHL1.

### Selected Partial Nucleic Acids

[0191] In a second series of nucleic acid embodiments, the invention provides isolated nucleic acids that encode select portions of human POSHL1. As will be further discussed herein below, these “partial”, nucleic acids can be used, inter alia, to express specific portions of the human POSHL1. These “partial” nucleic acids can also be used, inter alia, as nucleic probes.

[0192] In a first such embodiment, the invention provides an isolated nucleic acid comprising (i) the nucleotide sequence of SEQ ID NO: 4, (ii) a degenerate variant of SEQ ID NO: 6, or (iii) the complement of (i) or (ii), wherein the isolated nucleic acid is no more than about 100 kb in length, typically no more than about 75 kb in length, more typically no more than about 50 kb length. SEQ ID NO: 4 encodes a novel portion of human POSHL1. Often, the isolated nucleic acids of this embodiment are no more than about 25 kb in length, often no more than about 15 kb in length, and frequently no more than about 10 kb in length.

[0193] In another embodiment, the invention provides an isolated nucleic acid comprising (i) a nucleotide sequence that encodes SEQ ID NO: 7 or (ii) the complement of a nucleotide sequence that encodes SEQ ID NO 7, wherein the isolated nucleic acid is no more than about 100 kb in length, typically no more than about 75 kb in length, frequently no more than about 50 kb in length. SEQ ID NO 7 is the amino acid sequence encoded by the portion of human POSHL1 not found in any EST fragments. Often, the isolated nucleic acids of this embodiment are no more than about 25 kb in length, often no more than about 15 kb in length, and frequently no more than about 10 kb in length.

[0194] In another embodiment, the invention provides an isolated nucleic acid comprising (i) a nucleotide sequence that encodes SEQ ID NO 7, (ii) a nucleotide sequence that encodes SEQ ID NO: 7 with conservative substititions, or (iii) the complement of (i) or (ii), wherein the isolated nucleic acid is no more than about 100 kb in length, typically no more than about 75 kb in length, and often no more than about 50 kb in length. Often, the isolated nucleic acids of this embodiment are no more than about 25 kb in length, often no more than about 15 kb in length, and frequently no more than about 10 kb in length.

### Cross-Hybridizing Nucleic Acids

[0195] In another series of nucleic acid embodiments, the invention provides isolated nucleic acids that hybridize to various of the human POSHL1 nucleic acids of the present invention. These cross-hybridizing nucleic acids can be used, inter alia, as probes for, and to drive expression of, proteins that are related to human POSHL1 of the present invention as further isoforms, homologues, paralogues, or orthologues.

[0196] In a first such embodiment, the invention provides an isolated nucleic acid comprising a sequence that hybridizes under high stringency conditions to a probe the nucleotide sequence of which consists of at least 17 nt, 18, 19, 20, 21, 22, 23, 24, 25, 30, 40, or 50 nt of SEQ ID NO: 4 or the complement of SEQ ID NO: 4, wherein the isolated nucleic acid is no more than about 100 kb in length, typically no more than about 75 kb in length, and often no more than about 50 kb in length. Often, the isolated nucleic acids of this embodiment are no more than about 25 kb in length, often no more than about 15 kb in length, and frequently no more than about 10 kb in length.

[0197] In a further embodiment, the invention provides an isolated nucleic acid comprising a sequence that hybridizes under moderate stringency conditions to a probe the nucleotide sequence of which consists of atleast 17 nt, 18, 19, 20, 21, 22, 23, 24, 25, 30, 40, or 50 nt of SEQ ID NO: 4 or the complement of SEQ ID NO: 4, wherein the isolated nucleic acid is no more than about 100 kb in length, typically no more than about 75 kb in length, and often no more than about 50 kb in length. Often, the isolated nucleic acids of this embodiment are no more than about 25 kb in length, often no more than about 15 kb in length, and frequently no more than about 10 kb in length.

[0198] In a further embodiment, the invention provides an isolated nucleic acid comprising a sequence that hybridizes under high stringency conditions to a hybridization probe the nucleotide sequence of which (i) encodes a polypeptide having the sequence of SEQ ID NO: 7, (ii) encodes a polypeptide having the sequence of SEQ ID NO: 7 with conservative amino acid substitutions, or (iii) is the complement of (i) or (ii), wherein the isolated nucleic acid is no more than about 100 kb in length, typically no more than about 75 kb in length, and often no more than about 50 kb in length. Often, the isolated nucleic acids of this embodiment are no more than about 25 kb in length, often no more than about 15 kb in length, and frequently no more than about 10 kb in length.

### Particularly Useful Nucleic Acids

[0199] Particularly useful among the above-described nucleic acids are those that are expressed, or the complement of which are expressed, in adult liver, fetal liver, brain, lung, placenta, bone marrow, prostate, kidney, testis, adrenal gland and skeletal muscle.

[0200] Also particularly useful among the above-described nucleic acids are those that encode, or the complement of which encode a proto-oncogene/oncogene that interacts with members of the Rho family small GTPases and/or downstream effectors to relay signals in a signal transduction pathway.

[0201] Other particularly useful embodiments of the nucleic acids above-described are those that encode, or the complement of which encode, a polypeptide having at least one SH3 motif, and especially those that encode three SH3 motifs, those that encode a RING finger motif, and those that include all of a RING finger motif and three SH3 motifs.

### Nucleic Acid Fragments

[0202] In another series of nucleic acid embodiments, the invention provides fragments of various of the isolated nucleic acids of the present invention which prove useful, inter alia, as nucleic acid probes, as amplification primers, and to direct expression or synthesis of epitopic or immunogenic protein fragments.

[0203] In a first such embodiment, the invention provides an isolated nucleic acid comprising at least 17 nucleotides, 18 nucleotides, 20 nucleotides, 24 nucleotides, or 25 nucleotides of (i) SEQ ID NO: 4, (ii) a degenerate variant of SEQ ID NO: 6, or (iii) the complement of (i) or (ii), wherein the isolated nucleic acid is no more than about 100 kb in length, typically no more than about 75 kb in length, more typically no more than about 50 kb in length. Often, the isolated nucleic acids of this embodiment are no more than about 25 kb in length, often no more than about 15 kb in length, and frequently no more than about 10 kb in length.

[0204] The invention also provides an isolated nucleic acid comprising (i) a nucleotide sequence that encodes a peptide of at least 8 contiguous amino acids of SEQ ID NO: 7, (ii) a nucleotide sequence that encodes a peptide of at least 15 contiguous amino acids of SEQ ID NO: 7, or (iii) the complement of (i) or (ii), wherein the isolated nucleic acid is no more than about 100 kb in length, typically no more than about 75 kb in length, more typically no more than about 50 kb in length. Often, the isolated nucleic acids of this embodiment are no more than about 25 kb in length, often no more than about 15 kb in length, and frequently no more than about 10 kb in length.

[0205] The invention also provides an isolated nucleic acid comprising a nucleotide sequence that encodes (i) a polypeptide having the sequence of at least 8 contiguous amino acids of SEQ ID NO: 7 with conservative amino acid substitutions, (ii) a polypeptide having the sequence of at least 15 contiguous amino acids of SEQ ID NO: 7 with conservative amino acid substitutions, (iii) a polypeptide having the sequence of at least 8 contiguous amino acids of SEQ ID NO: 7 with moderately conservative substitutions, (iv) a polypeptide having the sequence of at last 15 congiuous amino acids of SEQ ID NO: 7 with moderately conservative substitutions, or (v) the complement of any of (i)-(iv), wherein the isolated nucleic acid is no more than about 100 kb in length, typically no more than about 75 kb in length, more typically no more than about 50 kb in length. Often, the isolated nucleic acids of this embodiment are no more than about 25 kb in length, often no more than about 15 kb in length, and frequently no more than about 10 kb in length.

### Single Exon Probes

[0206] The invention further provides genome-derived single exon probes having portions of no more than one exon of the human POSHL1 gene. As further described in commonly owned and copending U.S. patent application Ser. No. 09/632,366, filed Aug. 3, 2000 (“Methods and Apparatus for High Throughput Detection and Characterization of alternatively Spliced Genes”), the disclosure of which is incorporated herein by reference in its entirety, such single exon probes have particular utility in identifying and characterizing splice variants. In particular, such single exon probes are useful for identifying and discriminating the expression of distinct isoforms of human POSHL1.

[0207] In a first embodiment, the invention provides an isolated nucleic acid comprising a nucleotide sequence of no more than one portion of SEQ ID NOs: 8-17 or the complement of SEQ ID NOs: 8-17, wherein the portion comprises at least 17 contiguous nucleotides, 18 contiguous nucleotides, 20 contiguous nucleotides, 24 contiguous nucleotides, 25 contiguous nucleotides, or 50 contiguous nucleotides of any one of SEQ ID NOs: 8-17, or their complement. In a further embodiment, the exonic portion comprises the entirety of the referenced SEQ ID NO: or its complement.

[0208] In other embodiments, the invention provides isolated single exon probes having the nucleotide sequence of any one of SEQ ID NOs: 18-27.

### Transcription Control Nucleic Acids

[0209] In another aspect, the present invention provides genome-derived isolated nucleic acids that include nucleic acid sequence elements that control transcription of the human POSHL1 gene. These nucleic acids can be used, inter alia, to drive expression of heterologous coding regions in recombinant constructs, thus conferring upon such heterologous coding regions the expression pattern of the native human POSHL1 gene. These nucleic acids can also be used, conversely, to target heterologous transcription control elements to the human POSHL1 genomic locus, altering the expression pattern of the human POSHL1 gene itself.

[0210] In a first such embodiment, the invention provides an isolated nucleic acid comprising the nucleotide sequence of SEQ ID NO: 28 or its complement, wherein the isolated nucleic acid is no more than about 100 kb in length, typically no more than about 75 kb in length, more typically no more than about 50 kb in length. Often, the isolated nucleic acids of this embodiment are no more than about 25 kb in length, often no more than about 15 kb in length, and frequently no more than about 10 kb in length.

[0211] In another embodiment, the invention provides an isolated nucleic acid comprising at least 17, 18, 20, 24, or 25 nucleotides of the sequence of SEQ ID NO: 28 or its complement, wherein the isolated nucleic acid is no more than about 100 kb in length, typically no more than about 75 kb in length, more typically no more than about 50 kb in length. Often, the isolated nucleic acids of this embodiment are no more than about 25 kb in length, often no more than about 15 kb in length, and frequently no more than about 10 kb in length.

### Vectors and Host Cells

[0212] In another aspect, the present invention provides vectors that comprise one or more of the isolated nucleic acids of the present invention, and host cells in which such vectors have been introduced.

[0213] The vectors can be used, inter alia, for propagating the nucleic acids of the present invention in host cells (cloning vectors), for shuttling the nucleic acids of the present invention between host cells derived from disparate organisms (shuttle vectors), for inserting the nucleic acids of the present invention into host cell chromosomes (insertion vectors), for expressing sense or antisense RNA transcripts of the nucleic acids of the present invention in vitro or within a host cell, and for expressing polypeptides encoded by the nucleic acids of the present invention, alone or as fusions to heterologous polypeptides. Vectors of the present invention will often be suitable for several such uses.

[0214] Vectors are by now well-known in the art, and are described, inter alia, in Jones et al. (eds.), Vectors: Cloning Applications: Essential Techniques (Essential Techniques Series), John Wiley & Son Ltd 1998 (ISBN: 047196266X); Jones et al. (eds.), Vectors: Expression Systems: Essential Techniques (Essential Techniques Series), John Wiley & Son Ltd, 1998 (ISBN:0471962678); Gacesa et al., Vectors: Essential Data, John Wiley & Sons, 1995 (ISBN: 0471948411); Cid-Arregui (eds.), Viral Vectors: Basic Science and Gene Therapy, Eaton Publishing Co., 2000 (ISBN: 188129935X); Sambrook et al., Molecular Cloning: A Laboratory Manual (3^{rd} ed.), Cold Spring Harbor Laboratory Press, 2001 (ISBN: 0879695773); Ausubel et al. (eds.), Short Protocols in Molecular Biology: A Compendium of Methods from Current Protocols in Molecular Biology (4^{th} ed.), John Wiley & Sons, 1999 (ISBN: 047132938X), the disclosures of which are incorporated herein by reference in their entireties. Furthermore, an enormous variety of vectors are available commercially. Use of existing vectors and modifications thereof being well within the skill in the art, only basic features need be described here.

[0215] Typically, vectors are derived from virus, plasmid, prokaryotic or eukaryotic chromosomal elements, or some combination thereof, and include at least one origin of replication, at least one site for insertion of heterologous nucleic acid, typically in the form of a polylinker with multiple, tightly clustered, single cutting restriction sites, and at least one selectable marker, although some integrative vectors will lack an origin that is functional in the host to be chromosomally modified, and some vectors will lack selectable markers. Vectors of the present invention will further include at least one nucleic acid of the present invention inserted into the vector in at least one location.

[0216] Where present, the origin of replication and selectable markers are chosen based upon the desired host cell or host cells; the host cells, in turn, are selected based upon the desired application.

[0217] For example, prokaryotic cells, typically E. coli, are typically chosen for cloning. In such case, vector replication is predicated on the replication strategies of coliform-infecting phage—such as phage lambda, M13, T7, T3 and P1—or on the replication origin of autonomously replicating episomes, notably the ColE1 plasmid and later derivatives, including pBR322 and the pUC series plasmids. Where E. coli is used as host, selectable markers are, analogously, chosen for selectivity in gram negative bacteria: e.g., typical markers confer resistance to antibiotics, such as ampicillin, tetracycline, chloramphenicol, kanamycin, streptomycin, zeocin; auxotrophic markers can also be used.

[0218] As another example, yeast cells, typically S. cerevisiae, are chosen, inter alia, for eukaryotic genetic studies, due to the ease of targeting genetic changes by homologous recombination and to the ready ability to complement genetic defects using recombinantly expressed proteins, for identification of interacting protein components, e.g. through use of a two-hybrid system, and for protein expression. Vectors of the present invention for use in yeast will typically, but not invariably, contain an origin of replication suitable for use in yeast and a selectable marker that is functional in yeast.

[0219] Integrative YIp vectors do not replicate autonomously, but integrate, typically in single copy, into the yeast genome at low frequencies and thus replicate as part of the host cell chromosome; these vectors lack an origin of replication that is functional in yeast, although they typically have at least one origin of replication suitable for propagation of the vector in bacterial cells. YEp vectors, in contrast, replicate episomally and autonomously due to presence of the yeast 2 micron plasmid origin (2 μm ori). The YCp yeast centromere plasmid vectors are autonomously replicating vectors containing centromere sequences, CEN, and autonomously replicating sequences, ARS; the ARS sequences are believed to correspond to the natural replication origins of yeast chromosomes. YACs are based on yeast linear plasmids, denoted YLp, containing homologous or heterologous DNA sequences that function as telomeres (TEL) in vivo, as well as containing yeast ARS (origins of replication) and CEN (centromeres) segments.

[0220] Selectable markers in yeast vectors include a variety of auxotrophic markers, the most common of which are (in Saccharomyces cerevisiae) URA3, HIS3, LEU2, TRP1 and LYS2, which complement specific auxotrophic mutations, such as ura3-52, his3-D1, leu2-D1, trp1-D1 and lys2-201. The URA3 and LYS2 yeast genes further permit negative selection based on specific inhibitors, 5-fluoro-orotic acid (FOA) and α-aminoadipic acid (αAA), respectively, that prevent growth of the prototrophic strains but allows growth of the ura3 and lys2 mutants, respectively. Other selectable markers confer resistance to, e.g., zeocin.

[0221] As yet another example, insect cells are often chosen for high efficiency protein expression. Where the host cells are from Spodoptera frugiperda—e.g., Sf9 and Sf21 cell lines, and expresSF™ cells (Protein Sciences Corp., Meriden, Conn., USA)—the vector replicative strategy is typically based upon the baculovirus life cycle. Typically, baculovirus transfer vectors are used to replace the wild-type AcMNPV polyhedrin gene with a heterologous gene of interest. Sequences that flank the polyhedrin gene in the wild-type genome are positioned 5′ and 3′ of the expression cassette on the transfer vectors. Following cotransfection with AcMNPV DNA, a homologous recombination event occurs between these sequences resulting in a recombinant virus carrying the gene of interest and the polyhedrin or p10 promoter. Selection can be based upon visual screening for lacZ fusion activity.

[0222] As yet another example, mammalian cells are often chosen for expression of proteins intended as pharmaceutical agents, and are also chosen as host cells for screening of potential agonist and antagonists of a protein or a physiological pathway.

[0223] Where mammalian cells are chosen as host cells, vectors intended for autonomous extrachromosomal replication will typically include a viral origin, such as the SV40 origin (for replication in cell lines expressing the large T-antigen, such as COS1 and COS7 cells), the papillomavirus origin, or the EBV origin for long term episomal replication (for use, e.g., in 293-EBNA cells, which constitutively express the EBV EBNA-1 gene product and adenovirus E1A). Vectors intended for integration, and thus replication as part of the mammalian chromosome, can, but need not, include an origin of replication functional in mammalian cells, such as the SV40 origin. Vectors based upon viruses, such as adenovirus, adeno-associated virus, vaccinia virus, and various mammalian retroviruses, will typically replicate according to the viral replicative strategy.

[0224] Selectable markers for use in mammalian cells include resistance to neomycin (G418), blasticidin, hygromycin and to zeocin, and selection based upon the purine salvage pathway using HAT medium.

[0225] Plant cells can also be used for expression, with the vector replicon typically derived from a plant virus (e.g., cauliflower mosaic virus, CaMV; tobacco mosaic virus, TMV) and selectable markers chosen for suitability in plants.

[0226] For propagation of nucleic acids of the present invention that are larger than can readily be accomodated in vectors derived from plasmids or virus, the invention further provides artificial chromosomes—BACS, YACs, PACs, and HACs—that comprise human POSHL1 nucleic acids, often genomic nucleic acids.

[0227] The BAC system is based on the well-characterized E. coli F-factor, a low copy plasmid that exists in a supercoiled circular form in host cells. The structural features of the F-factor allow stable maintenance of individual human DNA clones as well as easy manipulation of the cloned DNA. See Shizuya et al., Keio J. Med. 50(1) :26-30 (2001); Shizuya et al., Proc. Natl. Acad. Sci. USA 89(18) :8794-7 (1992).

[0228] YACs are based on yeast linear plasmids, denoted YLp, containing homologous or heterologous DNA sequences that function as telomeres (TEL) in vivo, as well as containing yeast ARS (origins of replication) and CEN (centromeres) segments.

[0229] HACs are human artifical chromosomes. Kuroiwa et al., Nature Biotechnol. 18(10) :1086-90 (2000); Henning et al., Proc. Natl. Acad. Sci. USA 96(2) :592-7 (1999); Harrington et al., Nature Genet. 15(4) :345-55 (1997). In one version, long synthetic arrays of alpha satellite DNA are combined with telomeric DNA and genomic DNA to generate linear microchromosomes that are mitotically and cytogenetically stable in the absence of selection.

[0230] PACs are P1-derived artificial chromosomes. Sternberg, Proc. Natl. Acad. Sci. USA 87(1) :103-7 (1990); Sternberg et al., New Biol. 2(2) :151-62 (1990); Pierce et al., Proc. Natl Acad. Sci. USA 89(6) :2056-60 (1992).

[0231] Vectors of the present invention will also often include elements that permit in vitro transcription of RNA from the inserted heterologous nucleic acid. Such vectors typically include a phage promoter, such as that from T7, T3, or SP6, flanking the nucleic acid insert. Often two different such promoters flank the inserted nucleic acid, permitting separate in vitro production of both sense and antisense strands.

[0232] Expression vectors of the present invention—that is, those vectors that will drive expression of polypeptides from the inserted heterologous nucleic acid—will often include a variety of other genetic elements operatively linked to the protein-encoding heterologous nucleic acid insert, typically genetic elements that drive transcription, such as promoters and enhancer elements, those that facilitate RNA processing, such as transcription termination and/or polyadenylation signals, and those that facilitate translation, such as ribosomal consensus sequences.

[0233] For example, vectors for expressing proteins of the present invention in prokaryotic cells, typically E. coli, will include a promoter, often a phage promoter, such as phage lambda pL promoter, the trc promoter, a hybrid derived from the trp and lac promoters, the bacteriophage T7 promoter (in E. coli cells engineered to express the T7 polymerase), or the araBAD operon. Often, such prokaryotic expression vectors will further include transcription terminators, such as the aspA terminator, and elements that facilitate translation, such as a consensus ribosome binding site and translation termination codon, Schomer et al., Proc. Natl. Acad. Sci. USA 83:8506-8510 (1986).

[0234] As another example, vectors for expressing proteins of the present invention in yeast cells, typically S. cerevisiae, will include a yeast promoter, such as the CYC1 promoter, the GAL1 promoter, ADH1 promoter, or the GPD promoter, and will typically have elements that facilitate transcription termination, such as the transcription termination signals from the CYC1 or ADH1 gene.

[0235] As another example, vectors for expressing proteins of the present invention in mammalian cells will include a promoter active in mammalian cells. Such promoters are often drawn from mammalian viruses—such as the enhancer-promoter sequences from the immediate early gene of the human cytomegalovirus (CMV), the enhancer-promoter sequences from the Rous sarcoma virus long terminal repeat (RSV LTR), and the enhancer-promoter from SV40. Often, expression is enhanced by incorporation of polyadenylation sites, such as the late SV40 polyadenylation site and the polyadenylation signal and transcription termination sequences from the bovine growth hormone (BGH) gene, and ribosome binding sites. Furthermore, vectors can include introns, such as intron II of rabbit β-globin gene and the SV40 splice elements.

[0236] Vector-drive protein expression can be constitutive or inducible.

[0237] Inducible vectors include either naturally inducible promoters, such as the trc promoter, which is regulated by the lac operon, and the pL promoter, which is regulated by tryptophan, the MMTV-LTR promoter, which is inducible by dexamethasone, or can contain synthetic promoters and/or additional elements that confer inducible control on adjacent promoters. Examples of inducible synthetic promoters are the hybrid Plac/ara-1 promoter and the PLtetO-1 promoter. The PltetO-1 promoter takes advantage of the high expression levels from the PL promoter of phage lambda, but replaces the lambda repressor sites with two copies of operator 2 of the Tn10 tetracycline resistance operon, causing this promoter to be tightly repressed by the Tet repressor protein and induced in response to tetracycline (Tc) and Tc derivatives such as anhydrotetracycline.

[0238] As another example of inducible elements, hormone response elements, such as the glucocorticoid response element (GRE) and the estrogen response element (ERE), can confer hormone inducibility where vectors are used for expression in cells having the respective hormone receptors. To reduce background levels of expression, elements responsive to ecdysone, an insect hormone, can be used instead, with coexpression of the ecdysone receptor.

[0239] Expression vectors can be designed to fuse the expressed polypeptide to small protein tags that facilitate purification and/or visualization.

[0240] For example, proteins of the present invention can be expressed with a polyhistidine tag that facilitates purification of the fusion protein by immobilized metal affinity chromatography, for example using NiNTA resin (Qiagen Inc., Valencia, Calif., USA) or TALON™ resin (cobalt immobilized affinity chromatography medium, Clontech Labs, Palo Alto, Calif., USA). As another example, the fusion protein can include a chitin-binding tag and self-excising intein, permitting chitin-based purification with self-removal of the fused tag (IMPACT™ system, New England Biolabs, Inc., Beverley, Mass., USA). Alternatively, the fusion protein can include a calmodulin-binding peptide tag, permitting purification by calmodulin affinity resin (Stratagene, La Jolla, Calif., USA), or a specifically excisable fragment of the biotin carboxylase carrier protein, permitting purification of in vivo biotinylated protein using an avidin resin and subsequent tag removal (Promega, Madison, Wis., USA). As another useful alternative, the proteins of the present invention can be expressed as a fusion to glutathione-S-transferase, the affinity and specificity of binding to glutathione permitting purification using glutathione affinity resins, such as Glutathione-Superflow Resin (Clontech Laboratories, Palo Alto, Calif., USA), with subsequent elution with free glutathione.

[0241] Other tags include, for example, the Xpress epitope, detectable by anti-Xpress antibody (Invitrogen, Carlsbad, Calif., USA), a myc tag, detectable by anti-myc tag antibody, the V5 epitope, detectable by anti-V5 antibody (Invitrogen, Carlsbad, Calif., USA), FLAG® epitope, detectable by anti-FLAG® antibody (Stratagene, La Jolla, Calif., USA), and the HA epitope.

[0242] For secretion of expressed proteins, vectors can include appropriate sequences that encode secretion signals, such as leader peptides. For example, the pSecTag2 vectors (Invitrogen, Carlsbad, Calif., USA) are 5.2 kb mammalian expression vectors that carry the secretion signal from the V-J2-C region of the mouse Ig kappa-chain for efficient secretion of recombinant proteins from a variety of mammalian cell lines.

[0243] Expression vectors can also be designed to fuse proteins encoded by the heterologous nucleic acid insert to polypeptides larger than purification and/or identification tags. Useful protein fusions include those that permit display of the encoded protein on the surface of a phage or cell, fusions to intrinsically fluorescent proteins, such as those that have a green fluorescent protein (GFP)-like chromophore, fusions to the IgG Fc region, and fusions for use in two hybrid systems.

[0244] Vectors for phage display fuse the encoded polypeptide to, e.g., the gene III protein (pIII) or gene VIII protein (PVIII) for display on the surface of filamentous phage, such as M13. See Barbas et al., Phage Display: A Laboratory Manual, Cold Spring Harbor Laboratory Press (2001) (ISBN 0-87969-546-3); Kay et al. (eds.), Phage Display of Peptides and Proteins: A Laboratory Manual, San Diego: Academic Press, Inc., 1996; Abelson et al. (eds.), Combinatorial Chemistry, Methods in Enzymology vol. 267, Academic Press (May 1996).

[0245] Vectors for yeast display, e.g. the pYD1 yeast display vector (Invitrogen, Carlsbad, Calif., USA), use the α-agglutinin yeast adhesion receptor to display recombinant protein on the surface of S. cerevisiae. Vectors for mammalian display, e.g., the pDisplay™ vector (Invitrogen, Carlsbad, Calif., USA), target recombinant proteins using an N-terminal cell surface targeting signal and a C-terminal transmembrane anchoring domain of platelet derived growth factor receptor.

[0246] A wide variety of vectors now exist that fuse proteins encoded by heterologous nucleic acids to the chromophore of the substrate-independent, intrinsically fluorescent green fluorescent protein from Aequorea victoria (“GFP”) and its variants. These proteins are intrinsically fluorescent: the GFP-like chromophore is entirely encoded by its amino acid sequence and can fluoresce without requirement for cofactor or substrate.

[0247] Structurally, the GFP-like chromophore comprises an 11-stranded β-barrel (β-can) with a central α-helix, the central α-helix having a conjugated π-resonance system that includes two aromatic ring systems and the bridge between them. The π-resonance system is created by autocatalytic cyclization among amino acids; cyclization proceeds through an imidazolinone intermediate, with subsequent dehydrogenation by molecular oxygen at the Cα-Cβ bond of a participating tyrosine.

[0248] The GFP-like chromophore can be selected from GFP-like chromophores found in naturally occurring proteins, such as A. victoria GFP (GenBank accession number AAA27721), Renilla reniformis GFP, FP583 (GenBank accession no. AF168419) (DsRed), FP593 (AF272711), FP483 (AF168420), FP484 (AF168424), FP595 (AF246709), FP486 (AF168421), FP538 (AF168423), and FP506 (AF168422), and need include only so much of the native protein as is needed to retain the chromophore's intrinsic fluorescence. Methods for determining the minimal domain required for fluorescence are known in the art. Li et al., “Deletions of the Aequorea Victoria Green Fluorescent Protein Define the Minimal Domain Required for Fluorescence,” J. Biol. Chem. 272:28545-28549 (1997).

[0249] Alternatively, the GFP-like chromophore can be selected from GFP-like chromophores modified from those found in nature. Typically, such modifications are made to improve recombinant production in heterologous expression systems (with or without change in protein sequence), to alter the excitation and/or emission spectra of the native protein, to facilitate purification, to facilitate or as a consequence of cloning, or are a fortuitous consequence of research investigation.

[0250] The methods for engineering such modified GFP-like chromophores and testing them for fluorescence activity, both alone and as part of protein fusions, are well-known in the art. Early results of these efforts are reviewed in Heim et al., Curr. Biol. 6:178-182 (1996), incorporated herein by reference in its entirety; a more recent review, with tabulation of useful mutations, is found in Palm et al., “Spectral Variants of Green Fluorescent Protein,” in Green Fluorescent Proteins, Conn (ed.), Methods Enzymol. vol. 302, pp. 378-394 (1999), incorporated herein by reference in its entirety. A variety of such modified chromophores are now commercially available and can readily be used in the fusion proteins of the present invention.

[0251] For example, EGFP (“enhanced GFP”), Cormack et al., Gene 173:33-38 (1996); U.S. Pat. Nos. 6,090,919 and 5,804,387, is a red-shifted, human codon-optimized variant of GFP that has been engineered for brighter fluorescence, higher expression in mammalian cells, and for an excitation spectrum optimized for use in flow cytometers. EGFP can usefully contribute a GFP-like chromophore to the fusion proteins of the present invention. A variety of EGFP vectors, both plasmid and viral, are available commercially (Clontech Labs, Palo Alto, Calif., USA), including vectors for bacterial expression, vectors for N-terminal protein fusion expression, vectors for expression of C-terminal protein fusions, and for bicistronic expression.

[0252] Toward the other end of the emission spectrum, EBFP (“enhanced blue fluorescent protein”) and BFP2 contain four amino acid substitutions that shift the emission from green to blue, enhance the brightness of fluorescence and improve solubility of the protein, Heim et al., Curr. Biol. 6:178-182 (1996); Cormack et al., Gene 173:33-38 (1996). EBFP is optimized for expression in mammalian cells whereas BFP2, which retains the original jellyfish codons, can be expressed in bacteria; as is further discussed below, the host cell of production does not affect the utility of the resulting fusion protein. The GFP-like chromophores from EBFP and BFP2 can usefully be included in the fusion proteins of the present invention, and vectors containing these blue-shifted variants are available from Clontech Labs (Palo Alto, Calif., USA).

[0253] Analogously, EYFP (“enhanced yellow fluorescent protein”), also available from Clontech Labs, contains four amino acid substitutions, different from EBFP, Ormö et al., Science 273:1392-1395 (1996), that shift the emission from green to yellowish-green. Citrine, an improved yellow fluorescent protein mutant, is described in Heikal et al., Proc. Natl. Acad. Sci. USA 97:11996-12001 (2000). ECFP (“enhanced cyan fluorescent protein”) (Clontech Labs, Palo Alto, Calif., USA) contains six amino acid substitutions, one of which shifts the emission spectrum from green to cyan. Heim et al., Curr. Biol. 6:178-182 (1996); Miyawaki et al., Nature 388:882-887 (1997). The GFP-like chromophore of each of these GFP variants can usefully be included in the fusion proteins of the present invention.

[0254] The GFP-like chromophore can also be drawn from other modified GFPs, including those described in U.S. Pat. Nos. 6,124,128; 6,096,865; 6,090,919; 6,066,476; 6,054,321; 6,027,881; 5,968,750; 5,874,304; 5,804,387; 5,777,079; 5,741,668; and 5,625,048, the disclosures of which are incorporated herein by reference in their entireties. See also Conn (ed.), Green Fluorescent Protein, Methods in Enzymol. Vol. 302, pp 378-394 (1999), incorporated herein by reference in its entirety. A variety of such modified chromophores are now commercially available and can readily be used in the fusion proteins of the present invention.

[0255] Fusions to the IgG Fc region increase serum half life of protein pharmaceutical products through interaction with the FcRn receptor (also denominated the FcRp receptor and the Brambell receptor, FcRb), further described in international patent application nos. WO 97/43316, WO 97/34631, WO 96/32478, WO 96/18412.

[0256] For long-term, high-yield recombinant production of the proteins, protein fusions, and protein fragments of the present invention, stable expression is particularly useful.

[0257] Stable expression is readily achieved by integration into the host cell genome of vectors having selectable markers, followed by selection for integrants.

[0258] For example, the pUB6/V5-His A, B, and C vectors (Invitrogen, Carlsbad, Calif., USA) are designed for high-level stable expression of heterologous proteins in a wide range of mammalian tissue types and cell lines. pUB6/V5-His uses the promoter/enhancer sequence from the human ubiquitin C gene to drive expression of recombinant proteins: expression levels in 293, CHO, and NIH3T3 cells are comparable to levels from the CMV and human EF-1a promoters. The bsd gene permits rapid selection of stably transfected mammalian cells with the potent antibiotic blasticidin.

[0259] Replication incompetent retroviral vectors, typically derived from Moloney murine leukemia virus, prove particularly useful for creating stable transfectants having integrated provirus. The highly efficient transduction machinery of retroviruses, coupled with the availability of a variety of packaging cell lines—such as RetroPack™ PT 67, EcoPack2™-293, AmphoPack-293, GP2-293 cell lines (all available from Clontech Laboratories, Palo Alto, Calif., USA)—allow a wide host range to be infected with high efficiency; varying the multiplicity of infection readily adjusts the copy number of the integrated provirus. Retroviral vectors are available with a variety of selectable markers, such as resistance to neomycin, hygromycin, and puromycin, permitting ready selection of stable integrants.

[0260] The present invention further includes host cells comprising the vectors of the present invention, either present episomally within the cell or integrated, in whole or in part, into the host cell chromosome.

[0261] Among other considerations, some of which are described above, a host cell strain may be chosen for its ability to process the expressed protein in the desired fashion. Such post-translational modifications of the polypeptide include, but are not limited to, acetylation, carboxylation, glycosylation, phosphorylation, lipidation, and acylation, and it is an aspect of the present invention to provide human POSHL1 proteins with such post-translational modifications.

[0262] As noted earlier, host cells can be prokaryotic or eukaryotic. Representative examples of appropriate host cells include, but are not limited to, bacterial cells, such as E. coli, Caulobacter crescentus, Streptomyces species, and Salmonella typhimurium; yeast cells, such as Saccharomyces cerevisiae, Schizosaccharomyces pombe, Pichia pastoris, Pichia methanolica; insect cell lines, such as those from Spodoptera frugiperda—e.g., Sf9 and Sf21 cell lines, and expresSF™ cells (Protein Sciences Corp., Meriden, Conn., USA)—Drosophila S2 cells, and Trichoplusia ni High Five® Cells (Invitrogen, Carlsbad, Calif., USA); and mammalian cells. Typical mammalian cells include COS1 and COS7 cells, chinese hamster ovary (CHO) cells, NIH 3T3 cells, 293 cells, HEPG2 cells, HeLa cells, L cells, murine ES cell lines (e.g., from strains 129/SV, C57/BL6, DBA-1, 129/SVJ), K562, Jurkat cells, and BW5147. Other mammalian cell lines are well known and readily available from the American Type Culture Collection (ATCC) (Manassas, Va., USA) and the National Institute of General medical Sciences (NIGMS) Human Genetic Cell Repository at the Coriell Cell Repositories (Camden, N.J., USA).

[0263] Methods for introducing the vectors and nucleic acids of the present invention into the host cells are well known in the art; the choice of technique will depend primarily upon the specific vector to be introduced and the host cell chosen.

[0264] For example, phage lambda vectors will typically be packaged using a packaging extract (e.g., Gigapack® packaging extract, Stratagene, La Jolla, Calif., USA), and the packaged virus used to infect E. coli. Plasmid vectors will typically be introduced into chemically competent or electrocompetent bacterial cells.

[0265] E. coli cells can be rendered chemically competent by treatment, e.g., with CaCl₂, or a solution of Mg²⁺, Mn²⁺, Ca²⁺, Rb⁺ or K⁺, dimethyl sulfoxide, dithiothreitol, and hexamine cobalt (III), Hanahan, J. Mol. Biol. 166(4) :557-80 (1983), and vectors introduced by heat shock. A wide variety of chemically competent strains are also available commercially (e.g., Epicurian Coli® XL10-Gold® Ultracompetent Cells (Stratagene, La Jolla, Calif., USA); DH5α competent cells (Clontech Laboratories, Palo Alto, Calif., USA); TOP10 Chemically Competent E. coli Kit (Invitrogen, Carlsbad, Calif., USA)).

[0266] Bacterial cells can be rendered electrocompetent—that is, competent to take up exogenous DNA by electroporation—by various pre-pulse treatments; vectors are introduced by electroporation followed by subsequent outgrowth in selected media. An extensive series of protocols is provided online in Electroprotocols (BioRad, Richmond, Calif., USA) (http://www.bio-rad.com/LifeScience/pdf/New_Gene_Pulser.pdf).

[0267] Vectors can be introduced into yeast cells by spheroplasting, treatment with lithium salts, electroporation, or protoplast fusion.

[0268] Spheroplasts are prepared by the action of hydrolytic enzymes—a snail-gut extract, usually denoted Glusulase, or Zymolyase, an enzyme from Arthrobacter luteus—to remove portions of the cell wall in the presence of osmotic stabilizers, typically 1 M sorbitol. DNA is added to the spheroplasts, and the mixture is co-precipitated with a solution of polyethylene glycol (PEG) and Ca²⁺. Subsequently, the cells are resuspended in a solution of sorbitol, mixed with molten agar and then layered on the surface of a selective plate containing sorbitol. For lithium-mediated transformation, yeast cells are treated with lithium acetate, which apparently permeabilizes the cell wall, DNA is added and the cells are co-precipitated with PEG. The cells are exposed to a brief heat shock, washed free of PEG and lithium acetate, and subsequently spread on plates containing ordinary selective medium. Increased frequencies of transformation are obtained by using specially-prepared single-stranded carrier DNA and certain organic solvents. Schiestl et al., Curr. Genet. 16(5-6) :339-46 (1989). For electroporation, freshly-grown yeast cultures are typically washed, suspended in an osmotic protectant, such as sorbitol, mixed with DNA, and the cell suspension pulsed in an electroporation device. Subsequently, the cells are spread on the surface of plates containing selective media. Becker et al., Methods Enzymol. 194:182-7 (1991). The efficiency of transformation by electroporation can be increased over 100-fold by using PEG, single-stranded carrier DNA and cells that are in late log-phase of growth. Larger constructs, such as YACs, can be introduced by protoplast fusion.

[0269] Mammalian and insect cells can be directly infected by packaged viral vectors, or transfected by chemical or electrical means.

[0270] For chemical transfection, DNA can be coprecipitated with CaPO₄ or introduced using liposomal and nonliposomal lipid-based agents. Commercial kits are available for CaPO₄ transfection (CalPhos™ Mammalian Transfection Kit, Clontech Laboratories, Palo Alto, Calif., USA), and lipid-mediated transfection can be practiced using commercial reagents, such as LIPOFECTAMINE™ 2000, LIPOFECTAMINE™ Reagent, CELLFECTIN® Reagent, and LIPOFECTIN® Reagent (Invitrogen, Carlsbad, Calif., USA), DOTAP Liposomal Transfection Reagent, FuGENE 6, X-tremeGENE Q2, DOSPER, (Roche Molecular Biochemicals, Indianapolis, Ind. USA), Effectene™, PolyFect®, Superfect® (Qiagen, Inc., Valencia, Calif., USA). Protocols for electroporating mammalian cells can be found online in Electroprotocols (Bio-Rad, Richmond, Calif., USA) (http://www.bio-rad.com/LifeScience/pdf/New_Gene_Pulser.pdf). See also, Norton et al. (eds.), Gene Transfer Methods: Introducing DNA into Living Cells and Organisms, BioTechniques Books, Eaton Publishing Co. (2000) (ISBN 1-881299-34-1), incorporated herein by reference in its entirety.

[0271] Other transfection techniques include transfection by particle embardment. See, e.g., Cheng et al., Proc. Natl. Acad. Sci. USA 90(10) :4455-9 (1993); Yang et al., Proc. Natl. Acad. Sci. USA 87(24) :9568-72 (1990).

### Proteins

[0272] In another aspect, the present invention provides human POSHL1 proteins, various fragments thereof suitable for use as antigens (e.g., for epitope mapping) and for use as immunogens (e.g., for raising antibodies or as vaccines), fusions of human POSHL1 polypeptides and fragments to heterologous polypeptides, and conjugates of the proteins, fragments, and fusions of the present invention to other moieties (e.g., to carrier proteins, to fluorophores).

[0273] FIG. 3 presents the predicted amino acid sequences encoded by the human POSHL1 cDNA clone. The amino acid sequence is further presented, respectively, in SEQ ID NO: 3.

[0274] Unless otherwise indicated, amino acid sequences of the proteins of the present invention were determined as a predicted translation from a nucleic acid sequence. Accordingly, any amino acid sequence presented herein may contain errors due to errors in the nucleic acid sequence, as described in detail above. Furthermore, single nucleotide polymorphisms (SNPs) occur frequently in eukaryotic genomes—more than 1.4 million SNPs have already identified in the human genome, International Human Genome Sequencing Consortium, Nature 409:860-921 (2001)—and the sequence determined from one individual of a species may differ from other allelic forms present within the population. Small deletions and insertions can often be found that do not alter the function of the protein.

[0275] Accordingly, it is an aspect of the present invention to provide proteins not only identical in sequence to those described with particularity herein, but also to provide isolated proteins at least about 65% identical in sequence to those described with particularity herein, typically at least about 70%, 75%, 80%, 85%, or 90% identical in sequence to those described with particularity herein, usefully at least about 91%, 92%, 93%, 94%, or 95% identical in sequence to those described with particularity herein, usefully at least about 96%, 97%, 98%, or 99% identical in sequence to those described with particularity herein, and, most conservatively, at least about 99.5%, 99.6%, 99.7%, 99.8% and 99.9% identical in sequence to those described with particularity herein. These sequence variants can be naturally occurring or can result from human intervention by way of random or directed mutagenesis.

[0276] For purposes herein, percent identity of two amino acid sequences is determined using the procedure of Tatiana et al., “Blast 2 sequences—a new tool for comparing protein and nucleotide sequences”, FEMS Microbiol Lett. 174:247-250 (1999), which procedure is effectuated by the computer program BLAST 2 SEQUENCES, available online at http://www.ncbi.nlm.nih.gov/blast/bl2seq/bl2.html, To assess percent identity of amino acid sequences, the BLASTP module of BLAST 2 SEQUENCES is used with default values of (i) BLOSUM62 matrix, Henikoff et al., Proc. Natl. Acad. Sci. USA 89(22) :10915-9 (1992); (ii) open gap 11 and extension gap 1 penalties; and (iii) gap x_dropoff 50 expect 10 word size 3 filter, and both sequences are entered in their entireties.

[0277] As is well known, amino acid substitutions occur frequently among natural allelic variants, with conservative substitutions often occasioning only de minimis change in protein function.

[0278] Accordingly, it is an aspect of the present invention to provide proteins not only identical in sequence to those described with particularity herein, but also to provide isolated proteins having the sequence of human POSHL1 proteins, or portions thereof, with conservative amino acid substitutions. It is a further aspect to provide isolated proteins having the sequence of human POSHL1 proteins, and portions thereof, with moderately conservative amino acid substitutions. These conservatively-substituted and moderately conservatively-substituted variants can be naturally occurring or can result from human intervention.

[0279] Although there are a variety of metrics for calling conservative amino acid substitutions, based primarily on either observed changes among evolutionarily related proteins or on predicted chemical similarity, for purposes herein a conservative replacement is any change having a positive value in the PAM250 log-likelihood matrix reproduced herein below (see Gonnet et al., Science 256(5062) :1443-5 (1992)) :

| | A | R | N | D | C | Q | E | G | H | I | L | K | M | F | P | S | T | W | Y | V |
|---|---|---|---|---|---|---|---|---|---|---|---|---|---|---|---|---|---|---|---|---|
| A | 2 | −1 | 0 | 0 | 0 | 0 | 0 | 0 | −1 | −1 | −1 | 0 | −1 | −2 | 0 | 1 | 1 | −4 | −2 | 0 |
| R | −1 | 5 | 0 | 0 | −2 | 2 | 0 | −1 | 1 | −2 | −2 | 3 | −2 | −3 | −1 | 0 | 0 | −2 | −2 | −2 |
| N | 0 | 0 | 4 | 2 | −2 | 1 | 1 | 0 | 1 | −3 | −3 | 1 | −2 | −3 | −1 | 1 | 0 | −4 | −1 | −2 |
| D | 0 | 0 | 2 | 5 | −3 | 1 | 3 | 0 | 0 | −4 | −4 | 0 | −3 | −4 | −1 | 0 | 0 | −5 | −3 | −3 |
| C | 0 | −2 | −2 | −3 | 12 | −2 | −3 | −2 | −1 | −1 | −2 | −3 | −1 | −1 | −3 | 0 | 0 | −1 | 0 | 0 |
| Q | 0 | 2 | 1 | 1 | −2 | 3 | 2 | −1 | 1 | −2 | −2 | 2 | −1 | −3 | 0 | 0 | 0 | −3 | −2 | −2 |
| E | 0 | 0 | 1 | 3 | −3 | 2 | 4 | −1 | 0 | −3 | −3 | 1 | −2 | −4 | 0 | 0 | 0 | −4 | −3 | −2 |
| G | 0 | −1 | 0 | 0 | −2 | −1 | −1 | 7 | −1 | −4 | −4 | −1 | −4 | −5 | −2 | 0 | −1 | −4 | −4 | −3 |
| H | −1 | 1 | 1 | 0 | −1 | 1 | 0 | −1 | 6 | −2 | −2 | 1 | −1 | 0 | −1 | 0 | 0 | −1 | 2 | −2 |
| I | −1 | −2 | −3 | −4 | −1 | −2 | −3 | −4 | −2 | 4 | 3 | −2 | 2 | 1 | −3 | −2 | −1 | −2 | −1 | 3 |
| L | −1 | −2 | −3 | −4 | −2 | −2 | −3 | −4 | −2 | 3 | 4 | −2 | 3 | 2 | −2 | −2 | −1 | −1 | 0 | 2 |
| K | 0 | 3 | 1 | 0 | −3 | 2 | 1 | −1 | 1 | −2 | −2 | 3 | −1 | −3 | −1 | 0 | 0 | −4 | −2 | −2 |
| M | −1 | −2 | −2 | −3 | −1 | −1 | −2 | −4 | −1 | 2 | 3 | −1 | 4 | 2 | −2 | −1 | −1 | −1 | 0 | 2 |
| F | −2 | −3 | −3 | −4 | −1 | −3 | −4 | −5 | 0 | 1 | 2 | −3 | 2 | 7 | −4 | −3 | −2 | 4 | 5 | 0 |
| P | 0 | −1 | −1 | −1 | −3 | 0 | 0 | −2 | −1 | −3 | −2 | −1 | −2 | −4 | 8 | 0 | 0 | −5 | −3 | −2 |
| S | 1 | 0 | 1 | 0 | 0 | 0 | 0 | 0 | 0 | −2 | −2 | 0 | −1 | −3 | 0 | 2 | 2 | −3 | −2 | −1 |
| T | 1 | 0 | 0 | 0 | 0 | 0 | 0 | −1 | 0 | −1 | −1 | 0 | −1 | −2 | 0 | 2 | 2 | −4 | −2 | 0 |
| W | −4 | −2 | −4 | −5 | −1 | −3 | −4 | −4 | −1 | −2 | −1 | −4 | −1 | 4 | −5 | −3 | −4 | 14 | 4 | −3 |
| Y | −2 | −2 | −1 | −3 | 0 | −2 | −3 | −4 | 2 | −1 | 0 | −2 | 0 | 5 | −3 | −2 | −2 | 4 | 8 | −1 |
| V | 0 | −2 | −2 | −3 | 0 | −2 | −2 | −3 | −2 | 3 | 2 | −2 | 2 | 0 | −2 | −1 | 0 | −3 | −1 | 3 |

[0280] For purposes herein, a “moderately conservative” replacement is any change having a nonnegative value in the PAM250 log-likelihood matrix reproduced herein above.

[0281] As is also well known in the art, relatedness of proteins can also be characterized using a functional test, the ability of the encoding nucleic acids to base-pair to one another at defined hybridization stringencies.

[0282] It is, therefore, another aspect of the invention to provide isolated proteins not only identical in sequence to those described with particularity herein, but also to provide isolated proteins (“hybridization related proteins”) that are encoded by nucleic acids that hybridize under high stringency conditions (as defined herein above) to all or to a portion of various of the isolated nucleic acids of the present invention (“reference nucleic acids”). It is a further aspect of the invention to provide isolated proteins (“hybridization related proteins”) that are encoded by nucleic acids that hybridize under moderate stringency conditions (as defined herein above) to all or to a portion of various of the isolated nucleic acids of the present invention (“reference nucleic acids”).

[0283] The hybridization related proteins can be alternative isoforms, homologues, paralogues, and orthologues of the human POSHL1 protein of the present invention. Particularly useful orthologues are those from other primate species, such as chimpanzee, rhesus macaque monkey, baboon, orangutan, and gorilla, from rodents, such as rats, mice, guinea pigs; from lagomorphs, such as rabbits, and from domestic livestock, such as cow, pig, sheep, horse, and goat.

[0284] Relatedness of proteins can also be characterized using a second functional test, the ability of a first protein competitively to inhibit the binding of a second protein to an antibody.

[0285] It is, therefore, another aspect of the present invention to provide isolated proteins not only identical in sequence to those described with particularity herein, but also to provide isolated proteins (“cross-reactive proteins”) that competitively inhibit the binding of antibodies to all or to a portion of various of the isolated human POSHL1 proteins of the present invention (“reference proteins”). Such competitive inhibition can readily be determined using immunoassays well known in the art.

[0286] Among the proteins of the present invention that differ in amino acid sequence from those described with particularity herein—including those that have deletions and insertions causing up to 10% non-identity, those having conservative or moderately conservative substitutions, hybridization related proteins, and cross-reactive proteins—those that substantially retain one or more human POSHL1 activities are particularly useful. As described above, those activities include the ability to relay signals in a signal transduction pathway that is associated with tumor metastasis by interacting with both small GTPases and the downstream components in the pathway.

[0287] Residues that are tolerant of change while retaining function can be identified by altering the protein at known residues using methods known in the art, such as alanine scanning mutagenesis, Cunningham et al., Science 244(4908) :1081-5 (1989); transposon linker scanning mutagenesis, Chen et al., Gene 263(1-2) :39-48 (2001); combinations of homolog—and alanine-scanning mutagenesis, Jin et al., J. Mol. Biol. 226(3) :851-65 (1992); combinatorial alanine scanning, Weiss et al., Proc. Natl. Acad. Sci USA 97(16) :8950-4 (2000), followed by functional assay. Transposon linker scanning kits are available commercially (New England Biolabs, Beverly, Mass., USA, catalog. no. E7-102S; EZ::TN™ In-Frame Linker Insertion Kit, catalogue no. EZI04KN, Epicentre Technologies Corporation, Madison, Wis., USA).

[0288] As further described below, the isolated proteins of the present invention can readily be used as specific immunogens to raise antibodies that specifically recognize human POSHL1 proteins, their isoforms, homologues, paralogues, and/or orthologues. The antibodies, in turn, can be used, inter alia, specifically to assay for the human POSHL1 proteins of the present invention—e.g. by ELISA for detection of protein fluid samples, such as serum, by immunohistochemistry or laser scanning cytometry, for detection of protein in tissue samples, or by flow cytometry, for detection of intracellular protein in cell suspensions—for specific antibody-mediated isolation and/or purification of human POSHL1 proteins, as for example by immunoprecipitation, and for use as specific agonists or antagonists of human POSHL1 action.

[0289] The isolated proteins of the present invention are also immediately available for use as specific standards in assays used to determine the concentration and/or amount specifically of the human POSHL1 proteins of the present invention. As is well known, ELISA kits for detection and quantitation of protein analytes typically include isolated and purified protein of known concentration for use as a measurement standard (e.g., the human interferon-γ OptEIA kit, catalog no. 555142, Pharmingen, San Diego, Calif., USA includes human recombinant gamma interferon, baculovirus produced).

[0290] The isolated proteins of the present invention are also immediately available for use as specific biomolecule capture probes for surface-enhanced laser desorption ionization (SELDI) detection of protein-protein interactions, WO 98/59362; WO 98/59360; WO 98/59361; and Merchant et al., Electrophoresis 21(6) :1164-77 (2000), the disclosures of which are incorporated herein by reference in their entireties. Analogously, the isolated proteins of the present invention are also immediately available for use as specific biomolecule capture probes on BIACORE surface plasmon resonance probes. . See Weinberger et al., Pharmacogenomics 1(4) :395-416 (2000); Malmqvist, Biochem. Soc. Trans. 27(2) :335-40 (1999).

[0291] The isolated proteins of the present invention are also useful as a therapeutic supplement in patients having a specific deficiency in human POSHL1 production.

[0292] In another aspect, the invention also provides fragments of various of the proteins of the present invention. The protein fragments are useful, inter alia, as antigenic and immunogenic fragments of human POSHL1.

[0293] By “fragments” of a protein is here intended isolated proteins (equally, polypeptides, peptides, oligopeptides), however obtained, that have an amino acid sequence identical to a portion of the reference amino acid sequence, which portion is at least 6 amino acids and less than the entirety of the reference nucleic acid. As so defined, “fragments” need not be obtained by physical fragmentation of the reference protein, although such provenance is not thereby precluded.

[0294] Fragments of at least 6 contiguous amino acids are useful in mapping B cell and T cell epitopes of the reference protein. See, e.g., Geysen et al., “Use of peptide synthesis to probe viral antigens for epitopes to a resolution of a single amino acid,” Proc. Natl. Acad. Sci. USA 81:3998-4002 (1984) and U.S. Pat. Nos. 4,708,871 and 5,595,915, the disclosures of which are incorporated herein by reference in their entireties. Because the fragment need not itself be immunogenic, part of an immunodominant epitope, nor even recognized by native antibody, to be useful in such epitope mapping, all fragments of at least 6 amino acids of the proteins of the present invention have utility in such a study.

[0295] Fragments of at least 8 contiguous amino acids, often at least 15 contiguous amino acids, have utility as immunogens for raising antibodies that recognize the proteins of the present invention. See, e.g., Lerner, “Tapping the immunological repertoire to produce antibodies of predetermined specificity,” Nature 299:592-596 (1982); Shinnick et al., “Synthetic peptide immunogens as vaccines,” Annu. Rev. Microbiol. 37:425-46 (1983); Sutcliffe et al., “Antibodies that react with predetermined sites on proteins,” Science 219:660-6 (1983), the disclosures of which are incorporated herein by reference in their entireties. As further described in the above-cited references, virtually all 8-mers, conjugated to a carrier, such as a protein, prove immunogenic—that is, prove capable of eliciting antibody for the conjugated peptide; accordingly, all fragments of at least 8 amino acids of the proteins of the present invention have utility as immunogens.

[0296] Fragments of at least 8, 9, 10 or 12 contiguous amino acids are also useful as competitive inhibitors of binding of the entire protein, or a portion thereof, to antibodies (as in epitope mapping), and to natural binding partners, such as subunits in a multimeric complex or to receptors or ligands of the subject protein; this competitive inhibition permits identification and separation of molecules that bind specifically to the protein of interest, U.S. Pat. Nos. 5,539,084 and 5,783,674, incorporated herein by reference in their entireties.

[0297] The protein, or protein fragment, of the present invention is thus at least 6 amino acids in length, typically at least 8, 9, 10 or 12 amino acids in length, and often at least 15 amino acids in length. Often, the protein or the present invention, or fragment thereof, is at least 20 amino acids in length, even 25 amino acids, 30 amino acids, 35 amino acids, or 50 amino acids or more in length. of course, larger fragments having at least 75 amino acids, 100 amino acids, or even 150 amino acids are also useful, and at times preferred.

[0298] The present invention further provides fusions of each of the proteins and protein fragments of the present invention to heterologous polypeptides.

[0299] By fusion is here intended that the protein or protein fragment of the present invention is linearly contiguous to the heterologous polypeptide in a peptide-bonded polymer of amino acids or amino acid analogues; by “heterologous polypeptide” is here intended a polypeptide that does not naturally occur in contiguity with the protein or protein fragment of the present invention. As so defined, the fusion can consist entirely of a plurality of fragments of the human POSHL1 protein in altered arrangement; in such case, any of the human POSHL1 fragments can be considered heterologous to the other human POSHL1 fragments in the fusion protein. More typically, however, the heterologous polypeptide is not drawn from the human POSHL1 protein itself.

[0300] The fusion proteins of the present invention will include at least one fragment of the protein of the present invention, which fragment is at least 6, typically at least 8, often at least 15, and usefully at least 16, 17, 18, 19, or 20 amino acids long. The fragment of the protein of the present to be included in the fusion can usefully be at least 25 amino acids long, at least 50 amino acids long, and can be at least 75, 100, or even 150 amino acids long. Fusions that include the entirety of the proteins of the present invention have particular utility.

[0301] The heterologous polypeptide included within the fusion protein of the present invention is at least 6 amino acids in length, often at least 8 amino acids in length, and usefully at least 15, 20, and 25 amino acids in length. Fusions that include larger polypeptides, such as the IgG Fc region, and even entire proteins (such as GFP chromophore-containing proteins), have particular utility.

[0302] As described above in the description of vectors and expression vectors of the present invention, which discussion is incorporated herein by reference in its entirety, heterologous polypeptides to be included in the fusion proteins of the present invention can usefully include those designed to facilitate purification and/or visualization of recombinantly-expressed proteins. Although purification tags can also be incorporated into fusions that are chemically synthesized, chemical synthesis typically provides sufficient purity that further purification by HPLC suffices; however, visualization tags as above described retain their utility even when the protein is produced by chemical synthesis, and when so included render the fusion proteins of the present invention useful as directly detectable markers of human POSHL1 presence.

[0303] As also discussed above, heterologous polypeptides to be included in the fusion proteins of the present invention can usefully include those that facilitate secretion of recombinantly expressed proteins—into the periplasmic space or extracellular milieu for prokaryotic hosts, into the culture medium for eukaryotic cells—through incorporation of secretion signals and/or leader sequences.

[0304] Other useful protein fusions of the present invention include those that permit use of the protein of the present invention as bait in a yeast two-hybrid system. See Bartel et al. (eds.), The Yeast Two-Hybrid System, Oxford University Press (1997) (ISBN: 0195109384); Zhu et al., Yeast Hybrid Technologies, Eaton Publishing, (2000) (ISBN 1-881299-15-5); Fields et al., Trends Genet. 10(8) :286-92 (1994); Mendelsohn et al., Curr. Opin. Biotechnol. 5(5) :482-6 (1994); Luban et al., Curr. Opin. Biotechnol. 6(1) :59-64 (1995); Allen et al., Trends Biochem. Sci. 20(12) :511-6 (1995); Drees, Curr. Opin. Chem. Biol. 3(1) :64-70 (1999); Topcu et al., Pharm. Res. 17(9) :1049-55 (2000); Fashena et al., Gene 250(1-2) :1-14 (2000), the disclosures of which are incorporated herein by reference in their entireties. Typically, such fusion is to either E. coli LexA or yeast GAL4 DNA binding domains. Related bait plasmids are available that express the bait fused to a nuclear localization signal.

[0305] Other useful protein fusions include those that permit display of the encoded protein on the surface of a phage or cell, fusions to intrinsically fluorescent proteins, such as green fluorescent protein (GFP), and fusions to the IgG Fc region, as described above, which discussion is incorporated here by reference in its entirety.

[0306] The proteins and protein fragments of the present invention can also usefully be fused to protein toxins, such as Pseudomonas exotoxin A, diphtheria toxin, shiga toxin A, anthrax toxin lethal factor, ricin, in order to effect ablation of cells that bind or take up the proteins of the present invention.

[0307] The isolated proteins, protein fragments, and protein fusions of the present invention can be composed of natural amino acids linked by native peptide bonds, or can contain any or all of nonnatural amino acid analogues, nonnative bonds, and post-synthetic (post translational) modifications, either throughout the length of the protein or localized to one or more portions thereof.

[0308] As is well known in the art, when the isolated protein is used, e.g., for epitope mapping, the range of such nonnatural analogues, nonnative inter-residue bonds, or post-synthesis modifications will be limited to those that permit binding of the peptide to antibodies. When used as an immunogen for the preparation of antibodies in a non-human host, such as a mouse, the range of such nonnatural analogues, nonnative inter-residue bonds, or post-synthesis modifications will be limited to those that do not interfere with the immunogenicity of the protein. When the isolated protein is used as a therapeutic agent, such as a vaccine or for replacement therapy, the range of such changes will be limited to those that do not confer toxicity upon the isolated protein.

[0309] Non-natural amino acids can be incorporated during solid phase chemical synthesis or by recombinant techniques, although the former is typically more common.

[0310] Solid phase chemical synthesis of peptides is well established in the art. Procedures are described, inter alia, in Chan et al. (eds.), Fmoc Solid Phase Peptide Synthesis: A Practical Approach (Practical Approach Series), Oxford Univ. Press (March 2000) (ISBN: 0199637245); Jones, Amino Acid and Peptide Synthesis (Oxford Chemistry Primers, No 7), Oxford Univ. Press (August 1992) (ISBN: 0198556683); and Bodanszky, Principles of Peptide Synthesis (Springer Laboratory), Springer Verlag (December 1993) (ISBN: 0387564314) , the disclosures of which are incorporated herein by reference in their entireties.

[0311] For example, D-enantiomers of natural amino acids can readily be incorporated during chemical peptide synthesis: peptides assembled from D-amino acids are more resistant to proteolytic attack; incorporation of D-enantiomers can also be used to confer specific three dimensional conformations on the peptide. other amino acid analogues commonly added during chemical synthesis include ornithine, norleucine, phosphorylated amino acids (typically phosphoserine, phosphothreonine, phosphotyrosine) , L-malonyltyrosine, a non-hydrolyzable analog of phosphotyrosine (Kole et al., Biochem. Biophys. Res. Com. 209:817-821 (1995)), and various halogenated phenylalanine derivatives.

[0312] Amino acid analogues having detectable labels are also usefully incorporated during synthesis to provide a labeled polypeptide.

[0313] Biotin, for example (indirectly detectable through interaction with avidin, streptavidin, neutravidin, captavidin, or anti-biotin antibody), can be added using biotinoyl—(9-fluorenylmethoxycarbonyl)-L-lysine (FMOC biocytin) (Molecular Probes, Eugene, Oreg., USA). (Biotin can also be added enzymatically by incorporation into a fusion protein of a E. coli BirA substrate peptide.)

[0314] The FMOC and TBOC derivatives of dabcyl-L-lysine (Molecular Probes, Inc., Eugene, Oreg., USA) can be used to incorporate the dabcyl chromophore at selected sites in the peptide sequence during synthesis. The aminonaphthalene derivative EDANS, the most common fluorophore for pairing with the dabcyl quencher in fluorescence resonance energy transfer (FRET) systems, can be introduced during automated synthesis of peptides by using EDANS—FMOC-L-glutamic acid or the corresponding tBOC derivative (both from Molecular Probes, Inc., Eugene, Oreg., USA). Tetramethylrhodamine fluorophores can be incorporated during automated FMOC synthesis of peptides using (FMOC)—TMR-L-lysine (Molecular Probes, Inc. Eugene, Oreg., USA).

[0315] Other useful amino acid analogues that can be incorporated during chemical synthesis include aspartic acid, glutamic acid, lysine, and tyrosine analogues having allyl side-chain protection (Applied Biosystems, Inc., Foster City, Calif., USA); the allyl side chain permits synthesis of cyclic, branched-chain, sulfonated, glycosylated, and phosphorylated peptides.

[0316] A large number of other FMOC-protected non-natural amino acid analogues capable of incorporation during chemical synthesis are available commercially, including, e.g., Fmoc-2-aminobicyclo[2.2.1]heptane-2-carboxylic acid, Fmoc-3-endo-aminobicyclo[2.2.1]heptane-2-endo-carboxylic acid, Fmoc-3-exo-aminobicyclo[2.2.1]heptane-2-exo-carboxylic acid, Fmoc-3-endo-amino-bicyclo[2.2.1]hept-5-ene-2-endo-carboxylic acid, Fmoc-3-exo-amino-bicyclo[2.2.1]hept-5-ene-2-exo-carboxylic acid, Fmoc-cis-2-amino-1-cyclohexanecarboxylic acid, Fmoc-trans-2-amino-1-cyclohexanecarboxylic acid, Fmoc-1-amino-1-cyclopentanecarboxylic acid, Fmoc-cis-2-amino-1-cyclopentanecarboxylic acid, Fmoc-1-amino-1-cyclopropanecarboxylic acid, Fmoc-D-2-amino-4-(ethylthio)butyric acid, Fmoc-L-2-amino-4-(ethylthio)butyric acid, Fmoc-L-buthionine, Fmoc-S-methyl-L-Cysteine, Fmoc-2-aminobenzoic acid (anthranillic acid), Fmoc-3-aminobenzoic acid, Fmoc-4-aminobenzoic acid, Fmoc-2-aminobenzophenone-2′-carboxylic acid, Fmoc-N-(4-aminobenzoyl)-b-alanine, Fmoc-2-amino-4,5-dimethoxybenzoic acid, Fmoc-4-aminohippuric acid, Fmoc-2-amino-3-hydroxybenzoic acid, Fmoc-2-amino-5-hydroxybenzoic acid, Fmoc-3-amino-4-hydroxybenzoic acid, Fmoc-4-amino-3-hydroxybenzoic acid, Fmoc-4-amino-2-hydroxybenzoic acid, Fmoc-5-amino-2-hydroxybenzoic acid, Fmoc-2-amino-3-methoxybenzoic acid, Fmoc-4-amino-3-methoxybenzoic acid, Fmoc-2-amino-3-methylbenzoic acid, Fmoc-2-amino-5-methylbenzoic acid, Fmoc-2-amino-6-methylbenzoic acid, Fmoc-3-amino-2-methylbenzoic acid, Fmoc-3-amino-4-methylbenzoic acid, Fmoc-4-amino-3-methylbenzoic acid, Fmoc-3-amino-2-naphtoic acid, Fmoc-D,L-3-amino-3-phenylpropionic acid, Fmoc-L-Methyldopa, Fmoc-2-amino-4,6-dimethyl-3-pyridinecarboxylic acid, Fmoc-D,L-?-amino-2-thiophenacetic acid, Fmoc-4-(carboxymethyl)piperazine, Fmoc-4-carboxypiperazine, Fmoc-4-(carboxymethyl)homopiperazine, Fmoc-4-phenyl-4-piperidinecarboxylic acid, Fmoc-L-1,2,3,4-tetrahydronorharman-3-carboxylic acid, Fmoc-L-thiazolidine-4-carboxylic acid, all available from The Peptide Laboratory (Richmond, Calif., USA).

[0317] Non-natural residues can also be added biosynthetically by engineering a suppressor tRNA, typically one that recognizes the UAG stop codon, by chemical aminoacylation with the desired unnatural amino acid and. Conventional site-directed mutagenesis is used to introduce the chosen stop codon UAG at the site of interest in the protein gene. When the acylated suppressor tRNA and the mutant gene are combined in an in vitro transcription/translation system, the unnatural amino acid is incorporated in response to the UAG codon to give a protein containing that amino acid at the specified position. Liu et al., Proc. Natl Acad. Sci. USA 96(9) :4780-5 (1999); Wang et al., Science 292(5516) :498-500 (2001).

[0318] The isolated proteins, protein fragments and fusion proteins of the present invention can also include nonnative inter-residue bonds, including bonds that lead to circular and branched forms.

[0319] The isolated proteins and protein fragments of the present invention can also include post-translational and post-synthetic modifications, either throughout the length of the protein or localized to one or more portions thereof.

[0320] For example, when produced by recombinant expression in eukaryotic cells, the isolated proteins, fragments, and fusion proteins of the present invention will typically include N-linked and/or O-linked glycosylation, the pattern of which will reflect both the availability of glycosylation sites on the protein sequence and the identity of the host cell. Further modification of glycosylation pattern can be performed enzymatically.

[0321] As another example, recombinant polypeptides of the invention may also include an initial modified methionine residue, in some cases resulting from host-mediated processes.

[0322] When the proteins, protein fragments, and protein fusions of the present invention are produced by chemical synthesis, post-synthetic modification can be performed before deprotection and cleavage from the resin or after deprotection and cleavage. Modification before deprotection and cleavage of the synthesized protein often allows greater control, e.g. by allowing targeting of the modifying moiety to the N-terminus of a resin-bound synthetic peptide.

[0323] Useful post-synthetic (and post-translational) modifications include conjugation to detectable labels, such as fluorophores.

[0324] A wide variety of amine-reactive and thiol-reactive fluorophore derivatives have been synthesized that react under nondenaturing conditions with N-terminal amino groups and epsilon amino groups of lysine residues, on the one hand, and with free thiol groups of cysteine residues, on the other.

[0325] Kits are available commercially that permit conjugation of proteins to a variety of amine-reactive or thiol-reactive fluorophores: Molecular Probes, Inc. (Eugene, Oreg., USA), e.g., offers kits for conjugating proteins to Alexa Fluor 350, Alexa Fluor 430, Fluorescein-EX, Alexa Fluor 488, Oregon Green 488, Alexa Fluor 532, Alexa Fluor 546, Alexa Fluor 546, Alexa Fluor 568, Alexa Fluor 594, and Texas Red-X.

[0326] A wide variety of other amine-reactive and thiol-reactive fluorophores are available commercially (Molecular Probes, Inc., Eugene, Oreg., USA), including Alexa Fluor® 350, Alexa Fluor® 488, Alexa Fluor® 532, Alexa Fluor® 546, Alexa Fluor® 568, Alexa Fluor® 594, Alexa Fluor® 647 (monoclonal antibody labeling kits available from Molecular Probes, Inc., Eugene, Oreg., USA), BODIPY dyes, such as BODIPY 493/503, BODIPY FL, BODIPY R6G, BODIPY 530/550, BODIPY TMR, BODIPY 558/568, BODIPY 558/568, BODIPY 564/570, BODIPY 576/589, BODIPY 581/591, BODIPY TR, BODIPY 630/650, BODIPY 650/665, Cascade Blue, Cascade Yellow, Dansyl, lissamine rhodamine B, Marina Blue, Oregon Green 488, Oregon Green 514, Pacific Blue, rhodamine 6G, rhodamine green, rhodamine red, tetramethylrhodamine, Texas Red (available from Molecular Probes, Inc., Eugene, Oreg., USA).

[0327] The polypeptides of the present invention can also be conjugated to fluorophores, other proteins, and other macromolecules, using bifunctional linking reagents.

[0328] Common homobifunctional reagents include, e.g., APG, AEDP, BASED, BMB, BMDB, BMH, BMOE, BM[PEO]3, BM[PEO]4, BS3, BSOCOES, DFDNB, DMA, DMP, DMS, DPDPB, DSG, DSP (Lomant's Reagent), DSS, DST, DTBP, DTME, DTSSP, EGS, HBVS, Sulfo-BSOCOES, Sulfo-DST, Sulfo-EGS (all available from Pierce, Rockford, Ill., USA); common heterobifunctional cross-linkers include ABH, AMAS, ANB-NOS, APDP, ASBA, BMPA, BMPH, BMPS, EDC, EMCA, EMCH, EMCS, KMUA, KMUH, GMBS, LC-SMCC, LC-SPDP, MBS, M2C2H, MPBH, MSA, NHS-ASA, PDPH, PMPI, SADP, SAED, SAND, SANPAH, SASD, SATP, SBAP, SFAD, SIA, SIAB, SMCC, SMPB, SMPH, SMPT, SPDP, Sulfo-EMCS, Sulfo-GMBS, Sulfo-HSAB, Sulfo-KMUS, Sulfo-LC-SPDP, Sulfo-MBS, Sulfo-NHS-LC-ASA, Sulfo-SADP, Sulfo-SANPAH, Sulfo-SIAB, Sulfo-SMCC, Sulfo-SMPB, Sulfo-LC-SMPT, SVSB, TFCS (all available Pierce, Rockford, Ill., USA).

[0329] The proteins, protein fragments, and protein fusions of the present invention can be conjugated, using such cross-linking reagents, to fluorophores that are not amine- or thiol-reactive.

[0330] Other labels that usefully can be conjugated to the proteins, protein fragments, and fusion proteins of the present invention include radioactive labels, echosonographic contrast reagents, and MRI contrast agents.

[0331] The proteins, protein fragments, and protein fusions of the present invention can also usefully be conjugated using cross-linking agents to carrier proteins, such as KLH, bovine thyroglobulin, and even bovine serum albumin (BSA), to increase immunogenicity for raising anti-human POSHL1 antibodies.

[0332] The proteins, protein fragments, and protein fusions of the present invention can also usefully be conjugated to polyethylene glycol (PEG); PEGylation increases the serum half life of proteins administered intravenously for replacement therapy. Delgado et al., Crit. Rev. Ther. Drug Carrier Syst. 9(3-4) :249-304 (1992); Scott et al., Curr. Pharm. Des. 4(6) :423-38 (1998); DeSantis et al., Curr. Opin. Biotechnol. 10(4) :324-30 (1999), incorporated herein by reference in their entireties. PEG monomers can be attached to the protein directly or through a linker, with PEGylation using PEG monomers activated with tresyl chloride (2,2,2-trifluoroethanesulphonyl chloride) permitting direct attachment under mild conditions.

[0333] The isolated proteins of the present invention, including fusions thereof, can be produced by recombinant expression, typically using the expression vectors of the present invention as above-described or, if fewer than about 100 amino acids, by chemical synthesis (typically, solid phase synthesis), and, on occasion, by in vitro translation.

[0334] Production of the isolated proteins of the present invention can optionally be followed by purification. Purification of recombinantly expressed proteins is now well within the skill in the art. See, e.g., Thorner et al. (eds.), Applications of Chimeric Genes and Hybrid Proteins, Part A: Gene Expression and Protein Purification (Methods in Enzymology, Volume 326), Academic Press (2000), (ISBN: 0121822273); Harbin (ed.), Cloning, Gene Expression and Protein Purification : Experimental Procedures and Process Rationale, Oxford Univ. Press (2001) (ISBN: 0195132947); Marshak et al., Strategies for Protein Purification and Characterization: A Laboratory Course Manual, Cold Spring Harbor Laboratory Press (1996) (ISBN: 0-87969-385-1); and Roe (ed.), Protein Purification Applications, Oxford University Press (2001), the disclosures of which are incorporated herein by reference in their entireties, and thus need not be detailed here.

[0335] Briefly, however, if purification tags have been fused through use of an expression vector that appends such tag, purification can be effected, at least in part, by means appropriate to the tag, such as use of immobilized metal affinity chromatography for polyhistidine tags. Other techniques common in the art include ammonium sulfate fractionation, immunoprecipitation, fast protein liquid chromatography (FPLC), high performance liquid chromatography (HPLC), and preparative gel electrophoresis.

[0336] Purification of chemically-synthesized peptides can readily be effected, e.g., by HPLC.

[0337] Accordingly, it is an aspect of the present invention to provide the isolated proteins of the present invention in pure or substantially pure form.

[0338] A purified protein of the present invention is an isolated protein, as above described, that is present at a concentration of at least 95%, as measured on a weight basis (w/w) with respect to total protein in a composition. Such purities can often be obtained during chemical synthesis without further purification, as, e.g., by HPLC. Purified proteins of the present invention can be present at a concentration (measured on a weight basis with respect to total protein in a composition) of 96%, 97%, 98%, and even 99%. The proteins of the present invention can even be present at levels of 99.5%, 99.6%, and even 99.7%, 99.8%, or even 99.9% following purification, as by HPLC.

[0339] Although high levels of purity are particularly useful when the isolated proteins of the present invention are used as therapeutic agents—such as vaccines, or for replacement therapy—the isolated proteins of the present invention are also useful at lower purity. For example, partially purified proteins of the present invention can be used as immunogens to raise antibodies in laboratory animals.

[0340] Thus, in another aspect, the present invention provides the isolated proteins of the present invention in substantially purified form. A “substantially purified protein” of the present invention is an isolated protein, as above described, present at a concentration of at least 70%, measured on a weight basis with respect to total protein in a composition. Usefully, the substantially purified protein is present at a concentration, measured on a weight basis with respect to total protein in a composition, of at least 75%, 80%, or even at least 85%, 90%, 91%, 92%, 93%, 94%, 94.5% or even at least 94.9%.

[0341] In preferred embodiments, the purified and substantially purified proteins of the present invention are in compositions that lack detectable ampholytes, acrylamide monomers, bis-acrylamide monomers, and polyacrylamide.

[0342] The proteins, fragments, and fusions of the present invention can usefully be attached to a substrate. The substrate can porous or solid, planar or non-planar; the bond can be covalent or noncovalent.

[0343] For example, the proteins, fragments, and fusions of the present invention can usefully be bound to a porous substrate, commonly a membrane, typically comprising nitrocellulose, polyvinylidene fluoride (PVDF), or cationically derivatized, hydrophilic PVDF; so bound, the proteins, fragments, and fusions of the present invention can be used to detect and quantify antibodies, e.g. in serum, that bind specifically to the immobilized protein of the present invention.

[0344] As another example, the proteins, fragments, and fusions of the present invention can usefully be bound to a substantially nonporous substrate, such as plastic, to detect and quantify antibodies, e.g. in serum, that bind specifically to the immobilized protein of the present invention. Such plastics include polymethylacrylic, polyethylene, polypropylene, polyacrylate, polymethylmethacrylate, polyvinylchloride, polytetrafluoroethylene, polystyrene, polycarbonate, polyacetal, polysulfone, celluloseacetate, cellulosenitrate, nitrocellulose, or mixtures thereof; when the assay is performed in standard microtiter dish, the plastic is typically polystyrene.

[0345] The proteins, fragments, and fusions of the present invention can also be attached to a substrate suitable for use as a surface enhanced laser desorption ionization source; so attached, the protein, fragment, or fusion of the present invention is useful for binding and then detecting secondary proteins that bind with sufficient affinity or avidity to the surface-bound protein to indicate biologic interaction therebetween. The proteins, fragments, and fusions of the present invention can also be attached to a substrate suitable for use in surface plasmon resonance detection; so attached, the protein, fragment, or fusion of the present invention is useful for binding and then detecting secondary proteins that bind with sufficient affinity or avidity to the surface-bound protein to indicate biological interaction therebetween.

### Human POSHL1 Proteins

[0346] In a first series of protein embodiments, the invention provides an isolated human POSHL1 polypeptide having an amino acid sequence in SEQ ID NO: 3, which is full length human POSHL1 protein. When used as immunogen, the full length protein of the present invention can be used, inter alia, to elicit antibodies that bind to a variety of epitopes of the human POSHL1 protein.

[0347] The invention further provides fragments of the above-described polypeptides, particularly fragments having at least 6 amino acids, typically at least 8 amino acids, often at least 15 amino acids, and even the entirety of the sequence given in SEQ ID NO: 3.

[0348] The invention further provides fragments of at least 6 amino acids, typically at least 8 amino acids, often at least 15 amino acids, and even the entirety of the sequence given in SEQ ID NO: 7.

[0349] As described above, the invention further provides proteins that differ in sequence from those described with particularity in the above-referenced SEQ ID NOs., whether by way of insertion or deletion, by way of conservative or moderately conservative substitutions, as hybridization related proteins, or as cross-hybridizing proteins, with those that substantially retain a human POSHL1 activity particularly useful.

[0350] The invention further provides fusions of the proteins and protein fragments herein described to heterologous polypeptides.

### Antibodies and Antibody-Producing Cells

[0351] In another aspect, the invention provides antibodies, including fragments and derivatives thereof, that bind specifically to human POSHL1 proteins and protein fragments of the present invention or to one or more of the proteins and protein fragments encoded by the isolated human POSHL1 nucleic acids of the present invention. The antibodies of the present invention can be specific for all of linear epitopes, discontinuous epitopes, or conformational epitopes of such proteins or protein fragments, either as present on the protein in its native conformation or, in some cases, as present on the proteins as denatured, as, e.g., by solubilization in SDS.

[0352] In other embodiments, the invention provides antibodies, including fragments and derivatives thereof, the binding of which can be competitively inhibited by one or more of the human POSHL1 proteins and protein fragments of the present invention, or by one or more of the proteins and protein fragments encoded by the isolated human POSHL1 nucleic acids of the present invention.

[0353] As used herein, the term “antibody” refers to a polypeptide, at least a portion of which is encoded by at least one immunoglobulin gene, which can bind specifically to a first molecular species, and to fragments or derivatives thereof that remain capable of such specific binding.

[0354] By “bind specifically” and “specific binding” is here intended the ability of the antibody to bind to a first molecular species in preference to binding to other molecular species with which the antibody and first molecular species are admixed. An antibody is said specifically to “recognize” a first molecular species when it can bind specifically to that first molecular species.

[0355] As is well known in the art, the degree to which an antibody can discriminate as among molecular species in a mixture will depend, in part, upon the conformational relatedness of the species in the mixture; typically, the antibodies of the present invention will discriminate over adventitious binding to non-human POSHL1 proteins by at least two-fold, more typically by at least 5-fold, typically by more than 10-fold, 25-fold, 50-fold, 75-fold, and often by more than 100-fold, and on occasion by more than 500-fold or 1000-fold. When used to detect the proteins or protein fragments of the present invention, the antibody of the present invention is sufficiently specific when it can be used to determine the presence of the protein of the present invention in samples derived from human adult liver, fetal liver, brain, lung, placenta, bone marrow, prostate, kidney, testis, adrenal gland and skeletal muscle.

[0356] Typically, the affinity or avidity of an antibody (or antibody multimer, as in the case of an IgM pentamer) of the present invention for a protein or protein fragment of the present invention will be at least about 1×10⁻⁶ molar (M) typically at least about 5×10⁻⁷ M, usefully at least about 1×10⁻⁷ M, with affinities and avidities of at least 1×10⁻⁸ M, 5×10⁻⁹ M, and 1×10⁻¹⁰ M proving especially useful.

[0357] The antibodies of the present invention can be naturally-occurring forms, such as IgG, IgM, IgD, IgE, and IgA, from any mammalian species.

[0358] Human antibodies can, but will infrequently, be drawn directly from human donors or human cells. In such case, antibodies to the proteins of the present invention will typically have resulted from fortuitous immunization, such as autoimmune immunization, with the protein or protein fragments of the present invention. Such antibodies will typically, but will not invariably, be polyclonal.

[0359] Human antibodies are more frequently obtained using transgenic animals that express human immunoglobulin genes, which transgenic animals can be affirmatively immunized with the protein immunogen of the present invention. Human Ig-transgenic mice capable of producing human antibodies and methods of producing human antibodies therefrom upon specific immunization are described, inter alia, in U.S. Pat. Nos. 6,162,963; 6,150,584; 6,114,598; 6,075,181; 5,939,598; 5,877,397; 5,874,299; 5,814,318; 5,789,650; 5,770,429; 5,661,016; 5,633,425; 5,625,126; 5,569,825; 5,545,807; 5,545,806, and 5,591,669, the disclosures of which are incorporated herein by reference in their entireties. Such antibodies are typically monoclonal, and are typically produced using techniques developed for production of murine antibodies.

[0360] Human antibodies are particularly useful, and often preferred, when the antibodies of the present invention are to be administered to human beings as in vivo diagnostic or therapeutic agents, since recipient immune response to the administered antibody will often be substantially less than that occasioned by administration of an antibody derived from another species, such as mouse.

[0361] IgG, IgM, IgD, IgE and IgA antibodies of the present invention are also usefully obtained from other mammalian species, including rodents—typically mouse, but also rat, guinea pig, and hamster—lagomorphs, typically rabbits, and also larger mammals, such as sheep, goats, cows, and horses. In such cases, as with the transgenic human-antibody-producing non-human mammals, fortuitous immunization is not required, and the non-human mammal is typically affirmatively immunized, according to standard immunization protocols, with the protein or protein fragment of the present invention.

[0362] As discussed above, virtually all fragments of 8 or more contiguous amino acids of the proteins of the present invention can be used effectively as immunogens when conjugated to a carrier, typically a protein such as bovine thyroglobulin, keyhole limpet hemocyanin, or bovine serum albumin, conveniently using a bifunctional linker such as those described elsewhere above, which discussion is incorporated by reference here.

[0363] Immunogenicity can also be conferred by fusion of the proteins and protein fragments of the present invention to other moieties.

[0364] For example, peptides of the present invention can be produced by solid phase synthesis on a branched polylysine core matrix; these multiple antigenic peptides (MAPs) provide high purity, increased avidity, accurate chemical definition and improved safety in vaccine development. Tam et al., Proc. Natl. Acad. Sci. USA 85:5409-5413 (1988); Posnett et al., J. Biol. Chem. 263, 1719-1725 (1988).

[0365] Protocols for immunizing non-human mammals are well-established in the art, Harlow et al. (eds.), Antibodies: A Laboratory Manual, Cold Spring Harbor Laboratory (1998) (ISBN: 0879693142); Coligan et al. (eds.), Current Protocols in Immunology, John Wiley & Sons, Inc. (2001) (ISBN: 0-471-52276-7); Zola, Monoclonal Antibodies: Preparation and Use of Monoclonal Antibodies and Engineered Antibody Derivatives (Basics: From Background to Bench), Springer Verlag (2000) (ISBN: 0387915907), the disclosures of which are incorporated herein by reference, and often include multiple immunizations, either with or without adjuvants such as Freund's complete adjuvant and Freund's incomplete adjuvant.

[0366] Antibodies from nonhuman mammals can be polyclonal or monoclonal, with polyclonal antibodies having certain advantages in immunohistochemical detection of the proteins of the present invention and monoclonal antibodies having advantages in identifying and distinguishing particular epitopes of the proteins of the present invention.

[0367] Following immunization, the antibodies of the present invention can be produced using any art-accepted technique. Such techniques are well known in the art, Coligan et al. (eds.), Current Protocols in Immunology, John Wiley & Sons, Inc. (2001) (ISBN: 0-471-52276-7); Zola, Monoclonal Antibodies: Preparation and Use of Monoclonal Antibodies and Engineered Antibody Derivatives (Basics: From Background to Bench), Springer Verlag (2000) (ISBN: 0387915907); Howard et al. (eds.), Basic Methods in Antibody Production and Characterization, CRC Press (2000) (ISBN: 0849394457); Harlow et al. (eds.), Antibodies: A Laboratory Manual, Cold Spring Harbor Laboratory (1998) (ISBN: 0879693142); Davis (ed.), Monoclonal Antibody Protocols, Vol. 45, Humana Press (1995) (ISBN: 0896033082); Delves (ed.), Antibody Production: Essential Techniques, John Wiley & Son Ltd (1997) (ISBN: 0471970107); Kenney, Antibody Solution: An Antibody Methods Manual, Chapman & Hall (1997) (ISBN: 0412141914), incorporated herein by reference in their entireties, and thus need not be detailed here.

[0368] Briefly, however, such techniques include, inter alia, production of monoclonal antibodies by hybridomas and expression of antibodies or fragments or derivatives thereof from host cells engineered to express immunoglobulin genes or fragments thereof. These two methods of production are not mutually exclusive: genes encoding antibodies specific for the proteins or protein fragments of the present invention can be cloned from hybridomas and thereafter expressed in other host cells. Nor need the two necessarily be performed together: e.g., genes encoding antibodies specific for the proteins and protein fragments of the present invention can be cloned directly from B cells known to be specific for the desired protein, as further described in U.S. Pat. No. 5,627,052, the disclosure of which is incorporated herein by reference in its entirety, or from antibody-displaying phage.

[0369] Recombinant expression in host cells is particularly useful when fragments or derivatives of the antibodies of the present invention are desired.

[0370] Host cells for recombinant antibody production—either whole antibodies, antibody fragments, or antibody derivatives—can be prokaryotic or eukaryotic.

[0371] Prokaryotic hosts are particularly useful for producing phage displayed antibodies of the present invention.

[0372] The technology of phage-displayed antibodies, in which antibody variable region fragments are fused, for example, to the gene III protein (pIII) or gene VIII protein (pVIII) for display on the surface of filamentous phage, such as M13, is by now well-established, Sidhu, Curr. Opin. Biotechnol. 11(6) :610-6 (2000); Griffiths et al., Curr. Opin. Biotechnol. 9(1) :102-8 (1998); Hoogenboom et al., Immunotechnology, 4(1) :1-20 (1998); Rader et al., Current Opinion in Biotechnology 8:503-508 (1997); Aujame et al., Human Antibodies 8:155-168 (1997); Hoogenboom, Trends in Biotechnol. 15:62-70 (1997); de Kruif et al., 17:453-455 (1996); Barbas et al., Trends in Biotechnol. 14:230-234 (1996); Winter et al., Ann. Rev. Immunol. 433-455 (1994), and techniques and protocols required to generate, propagate, screen (pan), and use the antibody fragments from such libraries have recently been compiled, Barbas et al., Phage Display: A Laboratory Manual, Cold Spring Harbor Laboratory Press (2001) (ISBN 0-87969-546-3); Kay et al. (eds.), Phage Display of Peptides and Proteins: A Laboratory Manual, Academic Press, Inc. (1996); Abelson et al. (eds.), Combinatorial Chemistry, Methods in Enzymology vol. 267, Academic Press (May 1996), the disclosures of which are incorporated herein by reference in their entireties.

[0373] Typically, phage-displayed antibody fragments are scFv fragments or Fab fragments; when desired, full length antibodies can be produced by cloning the variable regions from the displaying phage into a complete antibody and expressing the full length antibody in a further prokaryotic or a eukaryotic host cell.

[0374] Eukaryotic cells are also useful for expression of the antibodies, antibody fragments, and antibody derivatives of the present invention.

[0375] For example, antibody fragments of the present invention can be produced in Pichia pastoris, Takahashi et al., Biosci. Biotechnol. Biochem. 64(10) :2138-44 (2000); Freyre et al., J. Biotechnol. 76(2-3) :157-63 (2000); Fischer et al., Biotechnol. Appl. Biochem. 30 (Pt 2) :117-20 (1999); Pennell et al., Res. Immunol. 149(6) :599-603 (1998); Eldin et al., J. Immunol. Methods. 201(1) :67-75 (1997); and in Saccharomyces cerevisiae, Frenken et al., Res. Immunol. 149(6) :589-99 (1998); Shusta et al., Nature Biotechnol. 16(8) :773-7 (1998), the disclosures of which are incorporated herein by reference in their entireties.

[0376] Antibodies, including antibody fragments and derivatives, of the present invention can also be produced in insect cells, Li et al., Protein Expr. Purif. 21(1) :121-8 (2001); Ailor et al., Biotechnol. Bioeng. 58(2-3) :196-203 (1998); Hsu et al., Biotechnol. Prog. 13(1) :96-104 (1997); Edelman et al., Immunology 91(1) :13-9 (1997); and Nesbit et al., J. Immunol. Methods. 151(1-2) :201-8 (1992), the disclosures of which are incorporated herein by reference in their entireties.

[0377] Antibodies and fragments and derivatives thereof of the present invention can also be produced in plant cells, Giddings et al., Nature Biotechnol. 18(11) :1151-5 (2000); Gavilondo et al., Biotechniques 29(1) :128-38 (2000); Fischer et al., J. Biol. Regul. Homeost. Agents 14(2) :83-92 (2000); Fischer et al., Biotechnol. Appl. Biochem. 30 (Pt 2) :113-6 (1999); Fischer et al., Biol. Chem. 380(7-8) :825-39 (1999); Russell, Curr. Top. Microbiol. Immunol. 240:119-38 (1999); and Ma et al., Plant Physiol. 109(2) :341-6 (1995), the disclosures of which are incorporated herein by reference in their entireties.

[0378] Mammalian cells useful for recombinant expression of antibodies, antibody fragments, and antibody derivatives of the present invention include CHO cells, COS cells, 293 cells, and myeloma cells.

[0379] Verma et al., J. Immunol. Methods 216 (1-2) :165-81 (1998), review and compare bacterial, yeast, insect and mammalian expression systems for expression of antibodies.

[0380] Antibodies of the present invention can also be prepared by cell free translation, as further described in Merk et al., J. Biochem. (Tokyo). 125(2) :328-33 (1999) and Ryabova et al., Nature Biotechnol. 15(1) :79-84 (1997), and in the milk of transgenic animals, as further described in Pollock et al., J. Immunol. Methods 231(1-2) :147-57 (1999), the disclosures of which are incorporated herein by reference in their entireties.

[0381] The invention further provides antibody fragments that bind specifically to one or more of the proteins and protein fragments of the present invention, to one or more of the proteins and protein fragments encoded by the isolated nucleic acids of the present invention, or the binding of which can be competitively inhibited by one or more of the proteins and protein fragments of the present invention or one or more of the proteins and protein fragments encoded by the isolated nucleic acids of the present invention.

[0382] Among such useful fragments are Fab, Fab′, Fv, F(ab)′₂, and single chain Fv (scFv) fragments. Other useful fragments are described in Hudson, Curr. Opin. Biotechnol. 9(4) :395-402 (1998) .

[0383] It is also an aspect of the present invention to provide antibody derivatives that bind specifically to one or more of the proteins and protein fragments of the present invention, to one or more of the proteins and protein fragments encoded by the isolated nucleic acids of the present invention, or the binding of which can be competitively inhibited by one or more of the proteins and protein fragments of the present invention or one or more of the proteins and protein fragments encoded by the isolated nucleic acids of the present invention.

[0384] Among such useful derivatives are chimeric, primatized, and humanized antibodies; such derivatives are less immunogenic in human beings, and thus more suitable for in vivo administration, than are unmodified antibodies from non-human mammalian species.

[0385] Chimeric antibodies typically include heavy and/or light chain variable regions (including both CDR and framework residues) of immunoglobulins of one species, typically mouse, fused to constant regions of another species, typically human. See, e.g., U.S. Pat. No. 5,807,715; Morrison et al., Proc. Natl. Acad. Sci USA.81(21) :6851-5 (1984); Sharon et al., Nature 309(5966) :364-7 (1984); Takeda et al., Nature 314(6010) :452-4 (1985), the disclosures of which are incorporated herein by reference in their entireties. Primatized and humanized antibodies typically include heavy and/or light chain CDRs from a murine antibody grafted into a non-human primate or human antibody V region framework, usually further comprising a human constant region, Riechmann et al., Nature 332(6162) :323-7 (1988); Co et al., Nature 351(6326) :501-2 (1991); U.S. Pat. Nos. 6,054,297; 5,821,337; 5,770,196; 5,766,886; 5,821,123; 5,869,619; 6,180,377; 6,013,256; 5,693,761; and 6,180,370, the disclosures of which are incorporated herein by reference in their entireties.

[0386] Other useful antibody derivatives of the invention include heteromeric antibody complexes and antibody fusions, such as diabodies (bispecific antibodies), single-chain diabodies, and intrabodies.

[0387] The antibodies of the present invention, including fragments and derivatives thereof, can usefully be labeled. It is, therefore, another aspect of the present invention to provide labeled antibodies that bind specifically to one or more of the proteins and protein fragments of the present invention, to one or more of the proteins and protein fragments encoded by the isolated nucleic acids of the present invention, or the binding of which can be competitively inhibited by one or more of the proteins and protein fragments of the present invention or one or more of the proteins and protein fragments encoded by the isolated nucleic acids of the present invention.

[0388] The choice of label depends, in part, upon the desired use.

[0389] For example, when the antibodies of the present invention are used for immunohistochemical staining of tissue samples, the label can usefully be an enzyme that catalyzes production and local deposition of a detectable product.

[0390] Enzymes typically conjugated to antibodies to permit their immunohistochemical visualization are well known, and include alkaline phosphatase, β-galactosidase, glucose oxidase, horseradish peroxidase (HRP), and urease. Typical substrates for production and deposition of visually detectable products include o-nitrophenyl-beta-D-galactopyranoside (ONPG); o-phenylenediamine dihydrochloride (OPD); p-nitrophenyl phosphate (PNPP); p-nitrophenyl-beta-D-galactopryanoside (PNPG); 3′,3′-diaminobenzidine (DAB); 3-amino-9-ethylcarbazole (AEC); 4-chloro-1-naphthol (CN); 5-bromo-4-chloro-3-indolyl-phosphate (BCIP); ABTS®; BluoGal; iodonitrotetrazolium (INT); nitroblue tetrazolium chloride (NBT); phenazine methosulfate (PMS); phenolphthalein monophosphate (PMP); tetramethyl benzidine (TMB); tetranitroblue tetrazolium (TNBT); X-Gal; X-Gluc; and X-Glucoside.

[0391] Other substrates can be used to produce products for local deposition that are luminescent. For example, in the presence of hydrogen peroxide (H₂O₂), horseradish peroxidase (HRP) can catalyze the oxidation of cyclic diacylhydrazides, such as luminol. Immediately following the oxidation, the luminol is in an excited state (intermediate reaction product), which decays to the ground state by emitting light. Strong enhancement of the light emission is produced by enhancers, such as phenolic compounds. Advantages include high sensitivity, high resolution, and rapid detection without radioactivity and requiring only small amounts of antibody. See, e.g., Thorpe et al., Methods Enzymol. 133:331-53 (1986); Kricka et al., J. Immunoassay 17(1) :67-83 (1996); and Lundqvist et al., J. Biolumin. Chemilumin. 10(6) :353-9 (1995), the disclosures of which are incorporated herein by reference in their entireties. Kits for such enhanced chemiluminescent detection (ECL) are available commercially.

[0392] The antibodies can also be labeled using colloidal gold.

[0393] As another example, when the antibodies of the present invention are used, e.g., for flow cytometric detection, for scanning laser cytometric detection, or for fluorescent immunoassay, they can usefully be labeled with fluorophores.

[0394] There are a wide variety of fluorophore labels that can usefully be attached to the antibodies of the present invention.

[0395] For flow cytometric applications, both for extracellular detection and for intracellular detection, common useful fluorophores can be fluorescein isothiocyanate (FITC), allophycocyanin (APC), R-phycoerythrin (PE), peridinin chlorophyll protein (PerCP), Texas Red, Cy3, Cy5, fluorescence resonance energy tandem fluorophores such as PerCP-Cy5.5, PE-Cy5, PE-Cy5.5, PE-Cy7, PE-Texas Red, and APC-Cy7.

[0396] Other fluorophores include, inter alia, Alexa Fluor® 350, Alexa Fluor® 488, Alexa Fluor® 532, Alexa Fluor® 546, Alexa Fluor® 568, Alexa Fluor® 594, Alexa Fluor® 647 (monoclonal antibody labeling kits available from Molecular Probes, Inc., Eugene, Oreg., USA), BODIPY dyes, such as BODIPY 493/503, BODIPY FL, BODIPY R6G, BODIPY 530/550, BODIPY TMR, BODIPY 558/568, BODIPY 558/568, BODIPY 564/570, BODIPY 576/589, BODIPY 581/591, BODIPY TR, BODIPY 630/650, BODIPY 650/665, Cascade Blue, Cascade Yellow, Dansyl, lissamine rhodamine B, Marina Blue, Oregon Green 488, Oregon Green 514, Pacific Blue, rhodamine 6G, rhodamine green, rhodamine red, tetramethylrhodamine, Texas Red (available from Molecular Probes, Inc., Eugene, Oreg., USA), and Cy2, Cy3, Cy3.5, Cy5, Cy5.5, Cy7, all of which are also useful for fluorescently labeling the antibodies of the present invention.

[0397] For secondary detection using labeled avidin, streptavidin, captavidin or neutravidin, the antibodies of the present invention can usefully be labeled with biotin.

[0398] When the antibodies of the present invention are used, e.g., for western blotting applications, they can usefully be labeled with radioisotopes, such as ³³P, ³²P, ³⁵S, ³H, and ¹²⁵I.

[0399] As another example, when the antibodies of the present invention are used for radioimmunotherapy, the label can usefully be ²²⁸Th, ²²⁷Ac, ²²⁵Ac, ²²³Ra, ²¹³Bi, ²¹²Pb, ²¹²Bi, ²¹¹At, ²⁰³Pb, ¹⁹⁴Os, ¹⁸⁸Re, ¹⁸⁶Re, ¹⁵³Sm, ¹⁴⁹Tb, ¹³¹I, ¹²⁵I, ¹¹¹In, ¹⁰⁵Rh, ^{99m}Tc, ⁹⁷Ru, ⁹⁰Y, ⁹⁰Sr, ⁸⁸Y, ⁷²Se, ⁶⁷Cu, or ⁴⁷Sc.

[0400] As another example, when the antibodies of the present invention are to be used for in vivo diagnostic use, they can be rendered detectable by conjugation to MRI contrast agents, such as gadolinium diethylenetriaminepentaacetic acid (DTPA), Lauffer et al., Radiology 207(2) :529-38 (1998), or by radioisotopic labeling

[0401] As would be understood, use of the labels described above is not restricted to the application as for which they were mentioned.

[0402] The antibodies of the present invention, including fragments and derivatives thereof, can also be conjugated to toxins, in order to target the toxin's ablative action to cells that display and/or express the proteins of the present invention. Commonly, the antibody in such immunotoxins is conjugated to Pseudomonas exotoxin A, diphtheria toxin, shiga toxin A, anthrax toxin lethal factor, or ricin. See Hall (ed.), Immunotoxin Methods and Protocols (Methods in Molecular Biology, Vol 166), Humana Press (2000) (ISBN:0896037754); and Frankel et al. (eds.), Clinical Applications of Immunotoxins, Springer-Verlag New York, Incorporated (1998) (ISBN:3540640975), the disclosures of which are incorporated herein by reference in their entireties, for review.

[0403] The antibodies of the present invention can usefully be attached to a substrate, and it is, therefore, another aspect of the invention to provide antibodies that bind specifically to one or more of the proteins and protein fragments of the present invention, to one or more of the proteins and protein fragments encoded by the isolated nucleic acids of the present invention, or the binding of which can be competitively inhibited by one or more of the proteins and protein fragments of the present invention or one or more of the proteins and protein fragments encoded by the isolated nucleic acids of the present invention, attached to a substrate.

[0404] Substrates can be porous or nonporous, planar or nonplanar.

[0405] For example, the antibodies of the present invention can usefully be conjugated to filtration media, such as NHS-activated Sepharose or CNBr-activated Sepharose for purposes of immunoaffinity chromatography.

[0406] For example, the antibodies of the present invention can usefully be attached to paramagnetic microspheres, typically by biotin-streptavidin interaction, which microsphere can then be used for isolation of cells that express or display the proteins of the present invention. As another example, the antibodies of the present invention can usefully be attached to the surface of a microtiter plate for ELISA.

[0407] As noted above, the antibodies of the present invention can be produced in prokaryotic and eukaryotic cells. It is, therefore, another aspect of the present invention to provide cells that express the antibodies of the present invention, including hybridoma cells, B cells, plasma cells, and host cells recombinantly modified to express the antibodies of the present invention.

[0408] In yet a further aspect, the present invention provides aptamers evolved to bind specifically to one or more of the proteins and protein fragments of the present invention, to one or more of the proteins and protein fragments encoded by the isolated nucleic acids of the present invention, or the binding of which can be competitively inhibited by one or more of the proteins and protein fragments of the present invention or one or more of the proteins and protein fragments encoded by the isolated nucleic acids of the present invention.

### Human POSHL1 Antibodies

[0409] In a first series of antibody embodiments, the invention provides antibodies, both polyclonal and monoclonal, and fragments and derivatives thereof, that bind specifically to a polypeptide having an amino acid sequence in SEQ ID NO: 3, which is the full length human POSHL1 protein.

[0410] Such antibodies are useful in in vitro immunoassays, such as ELISA, western blot or immunohistochemical assay of tumor tissues and cells. Such antibodies are also useful in isolating and purifying human POSHL1 proteins, including related cross-reactive proteins, by immunoprecipitation, immunoaffinity chromatography, or magnetic bead-mediated purification.

[0411] In another series of antibody embodiments, the invention provides antibodies, both polyclonal and monoclonal, and fragments and derivatives thereof, the specific binding of which can be competitively inhibited by the isolated proteins and polypeptides of the present invention.

[0412] In other embodiments, the invention further provides the above-described antibodies detectably labeled, and in yet other embodiments, provides the above-described antibodies attached to a substrate.

### Pharmaceutical Compositions

[0413] Human POSHL1 is important for transducing signals in a signal transduction pathway that is associated with tumor metastasis by interacting with both small GTPases and the downstream components in the pathway. Defects in human POSHL1 expression, activity, distribution, localization, and/or solubility are a cause of human disease, which disease can manifest as a disorder of adult liver, fetal liver, brain, lung, placenta, bone marrow, prostate, kidney, testis, adrenal gland and skeletal muscle function. Accordingly, pharmaceutical compositions comprising nucleic acids, proteins, and antibodies of the present invention, as well as mimetics, agonists, antagonists, or inhibitors of human POSHL1 activity, can be administered as therapeutics for treatment of human POSHL1 defects.

[0414] Thus, in another aspect, the invention provides pharmaceutical compositions comprising the nucleic acids, nucleic acid fragments, proteins, protein fusions, protein fragments, antibodies, antibody derivatives, antibody fragments, mimetics, agonists, antagonists, and inhibitors of the present invention.

[0415] Such a composition typically contains from about 0.1 to 90% by weight of a therapeutic agent of the invention formulated in and/or with a pharmaceutically acceptable carrier or excipient.

[0416] Pharmaceutical formulation is a well-established art, and is further described in Gennaro (ed.), Remington: The Science and Practice of Pharmacy, 20^{th} ed., Lippincott, Williams & Wilkins (2000) (ISBN: 0683306472); Ansel et al., Pharmaceutical Dosage Forms and Drug Delivery Systems, 7^{th} ed., Lippincott Williams & Wilkins Publishers (1999) (ISBN: 0683305727); and Kibbe (ed.), Handbook of Pharmaceutical Excipients American Pharmaceutical Association, 3^{rd} ed. (2000) (ISBN: 091733096X), the disclosures of which are incorporated herein by reference in their entireties, and thus need not be described in detail herein.

[0417] Briefly, however, formulation of the pharmaceutical compositions of the present invention will depend upon the route chosen for administration. The pharmaceutical compositions utilized in this invention can be administered by various routes including both enteral and parenteral routes, including oral, intravenous, intramuscular, subcutaneous, inhalation, topical, sublingual, rectal, intra-arterial, intramedullary, intrathecal, intraventricular, transmucosal, transdermal, intranasal, intraperitoneal, intrapulmonary, and intrauterine.

[0418] Oral dosage forms can be formulated as tablets, pills, dragees, capsules, liquids, gels, syrups, slurries, suspensions, and the like, for ingestion by the patient.

[0419] Solid formulations of the compositions for oral administration can contain suitable carriers or excipients, such as carbohydrate or protein fillers, such as sugars, including lactose, sucrose, mannitol, or sorbitol; starch from corn, wheat, rice, potato, or other plants; cellulose, such as methyl cellulose, hydroxypropylmethyl-cellulose, sodium carboxymethylcellulose, or microcrystalline cellulose; gums including arabic and tragacanth; proteins such as gelatin and collagen; inorganics, such as kaolin, calcium carbonate, dicalcium phosphate, sodium chloride; and other agents such as acacia and alginic acid.

[0420] Agents that facilitate disintegration and/or solubilization can be added, such as the cross-linked polyvinyl pyrrolidone, agar, alginic acid, or a salt thereof, such as sodium alginate, microcrystalline cellulose, corn starch, sodium starch glycolate, and alginic acid.

[0421] Tablet binders that can be used include acacia, methylcellulose, sodium carboxymethylcellulose, polyvinylpyrrolidone (Povidone™), hydroxypropyl methylcellulose, sucrose, starch and ethylcellulose.

[0422] Lubricants that can be used include magnesium stearates, stearic acid, silicone fluid, talc, waxes, oils, and colloidal silica.

[0423] Fillers, agents that facilitate disintegration and/or solubilization, tablet binders and lubricants, including the aforementioned, can be used singly or in combination.

[0424] Solid oral dosage forms need not be uniform throughout.

[0425] For example, dragee cores can be used in conjunction with suitable coatings, such as concentrated sugar solutions, which can also contain gum arabic, talc, polyvinylpyrrolidone, carbopol gel, polyethylene glycol, and/or titanium dioxide, lacquer solutions, and suitable organic solvents or solvent mixtures.

[0426] Oral dosage forms of the present invention include push-fit capsules made of gelatin, as well as soft, sealed capsules made of gelatin and a coating, such as glycerol or sorbitol. Push-fit capsules can contain active ingredients mixed with a filler or binders, such as lactose or starches, lubricants, such as talc or magnesium stearate, and, optionally, stabilizers. In soft capsules, the active compounds can be dissolved or suspended in suitable liquids, such as fatty oils, liquid, or liquid polyethylene glycol with or without stabilizers.

[0427] Additionally, dyestuffs or pigments can be added to the tablets or dragee coatings for product identification or to characterize the quantity of active compound, i.e., dosage.

[0428] Liquid formulations of the pharmaceutical compositions for oral (enteral) administration are prepared in water or other aqueous vehicles and can contain various suspending agents such as methylcellulose, alginates, tragacanth, pectin, kelgin, carrageenan, acacia, polyvinylpyrrolidone, and polyvinyl alcohol. The liquid formulations can also include solutions, emulsions, syrups and elixirs containing, together with the active compound(s), wetting agents, sweeteners, and coloring and flavoring agents.

[0429] The pharmaceutical compositions of the present invention can also be formulated for parenteral administration.

[0430] For intravenous injection, water soluble versions of the compounds of the present invention are formulated in, or if provided as a lyophilate, mixed with, a physiologically acceptable fluid vehicle, such as 5% dextrose (“D5”), physiologically buffered saline, 0.9% saline, Hanks' solution, or Ringer's solution.

[0431] Intramuscular preparations, e.g. a sterile formulation of a suitable soluble salt form of the compounds of the present invention, can be dissolved and administered in a pharmaceutical excipient such as Water-for-Injection, 0.9% saline, or 5% glucose solution. Alternatively, a suitable insoluble form of the compound can be prepared and administered as a suspension in an aqueous base or a pharmaceutically acceptable oil base, such as an ester of a long chain fatty acid (e.g., ethyl oleate), fatty oils such as sesame oil, triglycerides, or liposomes.

[0432] Parenteral formulations of the compositions can contain various carriers such as vegetable oils, dimethylacetamide, dimethylformamide, ethyl lactate, ethyl carbonate, isopropyl myristate, ethanol, polyols (glycerol, propylene glycol, liquid polyethylene glycol, and the like).

[0433] Aqueous injection suspensions can also contain substances that increase the viscosity of the suspension, such as sodium carboxymethyl cellulose, sorbitol, or dextran. Non-lipid polycationic amino polymers can also be used for delivery. optionally, the suspension can also contain suitable stabilizers or agents that increase the solubility of the compounds to allow for the preparation of highly concentrated solutions.

[0434] Pharmaceutical compositions of the present invention can also be formulated to permit injectable, long-term, deposition.

[0435] The pharmaceutical compositions of the present invention can be administered topically.

[0436] A topical semi-solid ointment formulation typically contains a concentration of the active ingredient from about 1 to 20%, e.g., 5 to 10%, in a carrier such as a pharmaceutical cream base. Various formulations for topical use include drops, tinctures, lotions, creams, solutions, and ointments containing the active ingredient and various supports and vehicles. In other transdermal formulations, typically in patch-delivered formulations, the pharmaceutically active compound is formulated with one or more skin penetrants, such as 2-N-methyl-pyrrolidone (NMP) or Azone.

[0437] Inhalation formulations can also readily be formulated. For inhalation, various powder and liquid formulations can be prepared.

[0438] The pharmaceutically active compound in the pharmaceutical compositions of the present inention can be provided as the salt of a variety of acids, including but not limited to hydrochloric, sulfuric, acetic, lactic, tartaric, malic, and succinic acid. Salts tend to be more soluble in aqueous or other protonic solvents than are the corresponding free base forms.

[0439] After pharmaceutical compositions have been prepared, they are packaged in an appropriate container and labeled for treatment of an indicated condition.

[0440] The active compound will be present in an amount effective to achieve the intended purpose. The determination of an effective dose is well within the capability of those skilled in the art.

[0441] A “therapeutically effective dose” refers to that amount of active ingredient—for example human POSHL1 protein, fusion protein, or fragments thereof, antibodies specific for human POSHL1, agonists, antagonists or inhibitors of human POSHL1—which ameliorates the signs or symptoms of the disease or prevents progression thereof; as would be understood in the medical arts, cure, although desired, is not required.

[0442] The therapeutically effective dose of the pharmaceutical agents of the present invention can be estimated initially by in vitro tests, such as cell culture assays, followed by assay in model animals, usually mice, rats, rabbits, dogs, or pigs. The animal model can also be used to determine an initial useful concentration range and route of administration.

[0443] For example, the ED50 (the dose therapeutically effective in 50% of the population) and LD50 (the dose lethal to 50% of the population) can be determined in one or more cell culture of animal model systems. The dose ratio of toxic to therapeutic effects is the therapeutic index, which can be expressed as LD50/ED50. Pharmaceutical compositions that exhibit large therapeutic indices are particularly useful.

[0444] The data obtained from cell culture assays and animal studies is used in formulating an initial dosage range for human use, and preferably provides a range of circulating concentrations that includes the ED50 with little or no toxicity. After administration, or between successive administrations, the circulating concentration of active agent varies within this range depending upon pharmacokinetic factors well known in the art, such as the dosage form employed, sensitivity of the patient, and the route of administration.

[0445] The exact dosage will be determined by the practitioner, in light of factors specific to the subject requiring treatment. Factors that can be taken into account by the practitioner include the severity of the disease state, general health of the subject, age, weight, gender of the subject, diet, time and frequency of administration, drug combination(s), reaction sensitivities, and tolerance/response to therapy. Long-acting pharmaceutical compositions can be administered every 3 to 4 days, every week, or once every two weeks depending on half-life and clearance rate of the particular formulation.

[0446] Normal dosage amounts may vary from 0.1 to 100,000 micrograms, up to a total dose of about 1 g, depending upon the route of administration. Where the therapeutic agent is a protein or antibody of the present invention, the therapeutic protein or antibody agent typically is administered at a daily dosage of 0.01 mg to 30 mg/kg of body weight of the patient (e.g., 1 mg/kg to 5 mg/kg). The pharmaceutical formulation can be administered in multiple doses per day, if desired, to achieve the total desired daily dose.

[0447] Guidance as to particular dosages and methods of delivery is provided in the literature and generally available to practitioners in the art. Those skilled in the art will employ different formulations for nucleotides than for proteins or their inhibitors. Similarly, delivery of polynucleotides or polypeptides will be specific to particular cells, conditions, locations, etc.

[0448] Conventional methods, known to those of ordinary skill in the art of medicine, can be used to administer the pharmaceutical formulation(s) of the present invention to the patient. The pharmaceutical compositions of the present invention can be administered alone, or in combination with other therapeutic agents or interventions.

### Therapeutic Methods

[0449] The present invention further provides methods of treating subjects having defects in human POSHL1—e.g., in expression, activity, distribution, localization, and/or solubility of human POSHL1—which can manifest as a disorder of adult liver, fetal liver, brain, lung, placenta, bone marrow, prostate, kidney, testis, adrenal gland and skeletal muscle function. As used herein, “treating” includes all medically-acceptable types of therapeutic intervention, including palliation and prophylaxis (prevention) of disease.

[0450] In one embodiment of the therapeutic methods of the present invention, a therapeutically effective amount of a pharmaceutical composition comprising human POSHL1 protein, fusion, fragment or derivative thereof is administered to a subject with a clinically-significant human POSHL1 defect.

[0451] Protein compositions are administered, for example, to complement a deficiency in native human POSHL1. In other embodiments, protein compositions are administered as a vaccine to elicit a humoral and/or cellular immune response to human POSHL1. The immune response can be used to modulate activity of human POSHL1 or, depending on the immunogen, to immunize against aberrant or aberrantly expressed forms, such as mutant or inappropriately expressed isoforms. In yet other embodiments, protein fusions having a toxic moiety are administered to ablate cells that aberrantly accumulate human POSHL1.

[0452] In another embodiment of the therapeutic methods of the present invention, a therapeutically effective amount of a pharmaceutical composition comprising nucleic acid of the present invention is administered. The nucleic acid can be delivered in a vector that drives expression of human POSHL1 protein, fusion, or fragment thereof, or without such vector.

[0453] Nucleic acid compositions that can drive expression of human POSHL1 are administered, for example, to complement a deficiency in native human POSHL1, or as DNA vaccines. Expression vectors derived from virus, replication deficient retroviruses, adenovirus, adeno-associated (AAV) virus, herpes virus, or vaccinia virus can be used—see, e.g., Cid-Arregui (ed.), Viral Vectors: Basic Science and Gene Therapy, Eaton Publishing Co., 2000 (ISBN: 188129935X)—as can plasmids.

[0454] Antisense nucleic acid compositions, or vectors that drive expression of human POSHL1 antisense nucleic acids, are administered to downregulate transcription and/or translation of human POSHL1 in circumstances in which excessive production, or production of aberrant protein, is the pathophysiologic basis of disease.

[0455] Antisense compositions useful in therapy can have sequence that is complementary to coding or to noncoding regions of the human POSHL1 gene. For example, oligonucleotides derived from the transcription initiation site, e.g., between positions −10 and +10 from the start site, are particularly useful.

[0456] Catalytic antisense compositions, such as ribozymes, that are capable of sequence-specific hybridization to human POSHL1 transcripts, are also useful in therapy. See, e.g., Phylactou, Adv. Drug Deliv. Rev. 44(2-3) :97-108 (2000); Phylactou et al., Hum. Mol. Genet. 7(10) :1649-53 (1998); Rossi, Ciba Found. Symp. 209:195-204 (1997); and Sigurdsson et al., Trends Biotechnol. 13(8) :286-9 (1995), the disclosures of which are incorporated herein by reference in their entireties.

[0457] Other nucleic acids useful in the therapeutic methods of the present invention are those that are capable of triplex helix formation in or near the human POSHL1 genomic locus. Such triplexing oligonucleotides are able to inhibit transcription, Intody et al., Nucleic Acids Res. 28(21) :4283-90 (2000); McGuffie et al., Cancer Res. 60(14) :3790-9 (2000), the disclosures of which are incorporated herein by reference, and pharmaceutical compositions comprising such triplex forming oligos (TFOs) are administered in circumstances in which excessive production, or production of aberrant protein, is a pathophysiologic basis of disease.

[0458] In another embodiment of the therapeutic methods of the present invention, a therapeutically effective amount of a pharmaceutical composition comprising an antibody (including fragment or derivative thereof) of the present invention is administered. As is well known, antibody compositions are administered, for example, to antagonize activity of human POSHL1, or to target therapeutic agents to sites of human POSHL1 presence and/or accumulation.

[0459] In another embodiment of the therapeutic methods of the present invention, a pharmaceutical composition comprising a non-antibody antagonist of human POSHL1 is administered. Antagonists of human POSHL1 can be produced using methods generally known in the art. In particular, purified human POSHL1 can be used to screen libraries of pharmaceutical agents, often combinatorial libraries of small molecules, to identify those that specifically bind and antagonize at least one activity of human POSHL1.

[0460] In other embodiments a pharmaceutical composition comprising an agonist of human POSHL1 is administered. Agonists can be identified using methods analogous to those used to identify antagonists.

[0461] In still other therapeutic methods of the present invention, pharmaceutical compositions comprising host cells that express human POSHL1, fusions, or fragments thereof can be administered. In such cases, the cells are typically autologous, so as to circumvent xenogeneic or allotypic rejection, and are administered to complement defects in human POSHL1 production or activity.

[0462] In other embodiments, pharmaceutical compositions comprising the human POSHL1 proteins, nucleic acids, antibodies, antagonists, and agonists of the present invention can be administered in combination with other appropriate therapeutic agents. Selection of the appropriate agents for use in combination therapy can be made by one of ordinary skill in the art according to conventional pharmaceutical principles. The combination of therapeutic agents or approaches can act additively or synergistically to effect the treatment or prevention of the various disorders described above, providing greater therapeutic efficacy and/or permitting use of the pharmaceutical compositions of the present invention using lower dosages, reducing the potential for adverse side effects.

### Transgenic Animals and Cells

[0463] In another aspect, the invention provides transgenic cells and non-human organisms comprising human POSHL1 isoform nucleic acids, and transgenic cells and non-human organisms with targeted disruption of the endogenous orthologue of the human POSHL1 gene.

[0464] The cells can be embryonic stem cells or somatic cells. The transgenic non-human organisms can be chimeric, nonchimeric heterozygotes, and nonchimeric homozygotes.

### Diagnostic Methods

[0465] The nucleic acids of the present invention can be used as nucleic acid probes to assess the levels of human POSHL1 mRNA in tumor tissues and cells, and antibodies of the present invention can be used to assess the expression levels of human POSHL1 proteins in tumor tissues and cells to diagnose cancer.

[0466] The following examples are offered for purpose of illustration, not limitation.

### EXAMPLE 1

### Identification and Characterization of cDNAs Encoding Human POSHL1 Protein

[0467] Predicating our gene discovery efforts on use of genome-derived single exon probes and hybridization to genome-derived single exon microarrays—an approach that we have previously demonstrated will readily identify novel genes that have proven refractory to mRNA-based identification efforts—we identified an exon in raw human genomic sequence that is particularly expressed in human adult liver, fetal liver, brain, lung, placenta, bone marrow, prostate, kidney, and adrenal gland.

[0468] Briefly, bioinformatic algorithms were applied to human genomic sequence data to identify putative exons. Each of the predicted exons was amplified from genomic DNA, typically centering the putative coding sequence within a larger amplicon that included flanking noncoding sequence. These genome-derived single exon probes were arrayed on a support and expression of the bioinformatically predicted exons assessed through a series of simultaneous two-color hybridizations to the genome-derived single exon microarrays.

[0469] The approach and procedures are further described in detail in Penn et al., “Mining the Human Genome using Microarrays of Open Reading Frames,” Nature Genetics 26:315-318 (2000); commonly owned and copending U.S. patent application Ser. No. 09/864,761, filed May 23, 2001, Ser. No. 09/774,203, filed Jan. 29, 2001, and Ser. No. 09/632,366, filed Aug. 3, 2000, the disclosures of which are incorporated herein by reference in their entireties.

[0470] Using a graphical display particularly designed to facilitate computerized query of the resulting exon-specific expression data, as further described in commonly owned and copending U.S. patent application Ser. No. 09/864,761, filed May 23, 2001, Ser. No. 09/774,203, filed Jan. 29, 2001 and Ser. No. 09/632,366, filed Aug. 3, 2000, the disclosures of which are incorporated herein by reference in their entireties, one exon was identified that is expressed in all the human tissues tested.

[0471] Table 1 summarizes the microarray expression data obtained using genome-derived single exon probe corresponding to exon 9. The probe was completely sequenced on both strands prior to its use on a genome-derived single exon microarray; sequencing confirmed the exact chemical structure of the probe. An added benefit of sequencing is that it placed us in possession of a set of single base-incremented fragments of the sequenced nucleic acid, starting from the sequencing primer's 3′ OH. (Since the single exon probes were first obtained by PCR amplification from genomic DNA, we were of course additionally in possession of an even larger set of single base incremented fragments of each of the single exon probes, each fragment corresponding to an extension product from one of the two amplification primers.)

[0472] Signals and expression ratios are normalized values measured and calculated as further described in commonly owned and copending U.S. patent application Ser. No. 09/864,761, filed May 23, 2001, Ser. No. 09/774,203, filed Jan. 29, 2001, Ser. No. 09/632,366, filed Aug. 3, 2000, and U.S. provisional patent application No. 60/207,456, filed May 26, 2000, the disclosures of which are incorporated herein by reference in their entireties.

TABLE 1
Expression Analysis
Genome-Derived Single Exon Microarray

Amplicon 85827, Exon 9

| (TISSUE) | Signal | Ratio |
|---|---|---|
| adrenal gland | 1.27 | −1.56 |
| adult liver | 2.05 | −1.02 |
| bone marrow | 0.73 | −2.15 |
| brain | 1.09 | −1.13 |
| fetal liver | 1.66 | 1.15 |
| kidney | 1.59 | −1.16 |
| lung | 1.93 | −1.12 |
| placenta | 1.67 | 1.02 |
| prostate | 1.67 | −1.24 |

[0473] As shown in Table 1, significant expression of exon 9 was seen in adrenal gland, adult liver, fetal liver, bone marrow, brain, kidney, lung, placenta, and prostate. Brain, lung, adrenal gland, bone marrow, testis, and skeletal muscle-specific expression was further confirmed by RT-PCR analysis (see below).

[0474] Marathon-Ready™ adult skeletal muscle cDNA (Clontech Laboratories, Palo Alto, Calif.) was used as a substrate for standard RACE (rapid amplification of cDNA ends) to obtain cDNA clones corresponding to the POSHL1 gene and that spans 2.5 kilobases and appears to contain the entire coding region of the gene to which the exon contributes; for reasons described below, we termed this cDNA POSHL1. Marathon-Ready™ cDNAs are adaptor-ligated double stranded cDNAs suitable for 3′ and 5′ RACE. Chenchik et al., BioTechniques 21:526-532 (1996); Chenchik et al., CLONTECHniques X(1) :5-8 (January 1995). RACE techniques are described, inter alia, in the Marathon-Ready™ cDNA User Manual (Clontech Labs., Palo Alto, Calif., USA, Mar. 30, 2000, Part No. PT1156-1 (PR03517)), Ausubel et al. (eds.), Short Protocols in Molecular Biology: A Compendium of Methods from Current Protocols in Molecular Biology, 4th edition (April 1999), John Wiley & Sons (ISBN: 047132938X) and Sambrook et al. (eds.), Molecular Cloning: A Laboratory Manual (3rd ed.), Cold Spring Harbor Laboratory Press (2000) (ISBN: 0879695773), the disclosures of which are incorporated herein by reference in their entireties.

[0475] Two overlapping RACE products were cloned that together contained the complete sequence of POSHL1. The POSHL1 cDNA clones were sequenced on both strands using a MegaBace™ 1000 sequencer (Amersham Biosciences, Sunnyvale, Calif.). Sequencing both strands provided us with the exact chemical structure of the cDNAs, which are shown in FIG. 3 and further presented in the SEQUENCE LISTING as SEQ ID NO: 3 and 6, and placed us in actual physical possession of the entire set of single-base incremented fragments of the sequenced clone, starting at the 5′ and 3′ termini.

[0476] As shown in FIG. 3, the human POSHL1 cDNA spans 2497 nucleotides and contains an open reading frame from nucleotide 232 through and including nt 2421 (inclusive of termination codon), predicting a protein of 729 amino acids with a (posttranslationally unmodified) molecular weight of 79.2 kD. The clone appears full length, with the reading frame opening starting with a methionine and terminating with a stop codon.

[0477] BLAST query of genomic sequence identified 3 BACS, spanning over 115 kb, that constitute the minimum set of clones encompassing the cDNA sequence. Based upon the known origin of the BACs (GenBank accession numbers AC005216.1, AC005351.1 and AC011359.5), the human POSHL1 gene can be mapped to human chromosome 5q32.

[0478] Comparison of the cDNA and genomic sequences identified 10 exons. Exon organization is listed in Table 2.

TABLE 2
POSHL1 Exon Structure

| Exon no. | cDNA range | genomic range | BAC accession |
|---|---|---|---|
| 1 | 1-125 | 51531-51407 | AC011359.5 |
| 2 | 126-609 | 50278-49795 | |
| 3 | 610-879 | 43013-43282 | AC005351.1 |
| 4 | 880-975 | 47013-47108 | |
| 5 | 976-1290 | 9967-10281 | AC005216.1 |
| 6 | 1291-1382 | 43975-44066 | |
| 7 | 1383-1553 | 45278-45448 | |
| 8 | 1554-1786 | 52184-52416 | |
| 9 | 1787-2145 | 56065-56423 | |
| 10 | 2146-2487 | 58625-58966 | |

[0479] FIG. 2 schematizes the exon organization of the human POSHL1 clone.

[0480] At the top is shown the three bacterial artificial chromosomes (BACs), with GenBank accession numbers, that span the POSHL1 locus. The genome-derived single-exon probe first used to demonstrate expression from this locus is shown below the BACs and labeled “474”. The 474 bp probe includes sequence drawn from exon 9, with additional sequence from intron 8.

[0481] As shown in FIG. 2, POSHL1, encoding a protein of 729 amino acids, comprises exons 1-10. Predicted molecular weight, prior to any post translational modification, is 79.2 kD. The clone appears full length, with the reading frame opening starting with a methionine and terminating with a stop codon.

[0482] As further discussed in the examples herein, expression of POSHL1 was assessed using hybridization to genome-derived single exon microarrays and RT-PCR. Microarray analysis of the exon nine showed expression in all tissues tested, including fetal liver, adult liver, brain, lung, kidney, prostate, adrenal gland, placenta and bone marrow. RT-PCR confirmed microarray data, and further provided expression data for testis and skeletal muscle.

[0483] The sequence of the human POSHL1 cDNA was used as a BLAST query into the GenBank nr and dbEst databases. The nr database includes all non-redundant GenBank coding sequence translations, sequences derived from the 3-dimensional structures in the Brookhaven Protein Data Bank (PDB), sequences from SwissProt, sequences from the protein information resource (PIR), and sequences from protein research foundation (PRF). The dbEst (database of expressed sequence tags) includes ESTs, short, single pass read cDNA (mRNA) sequences, and cDNA sequences from differential display experiments and RACE experiments.

[0484] BLAST search identified multiple human and mouse ESTs, four ESTs from pig, one from cow (BF077029.1), one from rat (BF543765.1) and one from cat (AW646761.1) as having sequence closely related to POSHL1.

[0485] Globally, the human POSHL1 protein resembles a putative human transcript (GenBank accession: AK021429.1, the POSHL1 protein with 35% amino acid identity and 50% amino acid similarity over 621 amino acids). POSHL1 aslo resembles the mouse POSH gene (GenBank accession: AF030131.1, the POSHL1 protein with 33% amino acid identity and 49% amino acid similarity over 691 amino acids), and the Drosophila POSH gene (GenBank accession: AF220364.1, the POSHL1 protein with 31% amino acid identity and 48% amino acid similarity over 439 amino acids).

[0486] Motif searches using Pfam (http://pfam.wustl.edu), SMART (http://smart.embl—heidelberg.de), and PROSITE pattern and profile databases (http://www.expasy.ch/prosite), identified several known domains shared with mouse POSH protein.

[0487] FIG. 1 shows the domain structure of human POSHL1.

[0488] As schematized in FIG. 1, the newly isolated gene product shares certain protein domains and an overall structural organization with mouse POSH protein. The shared structural features strongly imply that human POSHL1 plays a role similar to that of mouse POSH protein in interacting with members of the Rho family small GTPases, as well as components of the JNK kinase cascade. POSHL1 is a potential proto-oncogene/oncogene.

[0489] Like mouse POSH protein, human POSHL1 has one N-terminal RING finger domain and several SH3 domains (three SH3 domains for POSHL1 and four for POSH). In POSHL1, the RING finger domain occurs at residues 12-52 and the three SH3 domains occur at residues 126-182, 188-249, and 381-439 respectively (http://www.ncbi.nlm.nih.gov/Structure/cdd). E3 ubiquitin-protein ligase activity is intrinsic to the RING finger domain of c-Cbl and is likely to be a general function of this domain. Various RING finger domains exhibit binding activity towards E2 ubiquitin-conjugating enzymes (Ubc's). SH3 (Src homology 3) domains are often indicative of a protein involved in signal transduction related to cytoskeletal organization. SH3 domain was first described in the Src cytoplasmic tyrosine kinase. The structure of SH3 is a partly opened beta barrel.

[0490] Other signatures of the newly isolated POSHL1 proteins were identified by searching the PROSITE database (http://www.expasy.ch/tools/scnpsit1.html). These include four N-glycosylation sites (250-253, 270-273, 281-284, and 519-522), two cAMP- and cGMP-dependent protein kinase phosphorylation sites (441-444 and 704-707), fifteen Protein kinase C phosphorylation sites, nine Casein kinase II phosphorylation sites, a single Tyrosine kinase phosphorylation site (155-163), twelve N-myristoylation site, and a single amidation site (98-101).

[0491] Possession of the genomic sequence permitted search for promoter and other control sequences for the human POSHL1 gene.

[0492] A putative transcriptional control region, inclusive of promoter and downstream elements, was defined as 1 kb around the transcription start site, itself defined as the first nucleotide of the human POSHL1 cDNA clone. The region, drawn from sequence of BAC AC011359.5, has the sequence given in SEQ ID NO: 28, which lists 1000 nucleotides before the transcription start site.

[0493] Transcription factor binding sites were identified using a web based program (http://motif.genome.ad.jp/), including binding sites for HSF (132-136, 388-392, 624-628, 770-774, and 856-860), GATA-2 (290-299 and 576-585), GATA-3 (290-299 and 576-585), Lmo2 (291-299 and 576-584), NIT2 (93-98, 369-374, 371-376, and 579-584), Lyf1 (32-40), CdxA (322-328, 387-393, and 735-741, with numbering according to SEQ ID NO: 28), amongst others.

[0494] We have thus identified a newly described human gene, human POSHL1, which shares certain protein domains and an overall structural organization with mouse POSH protein. The shared structural features strongly imply that the human POSHL1 protein plays a role similar to mouse POSH protein, interacting with members of the Rho family small GTPases, as well as components of the JNK kinase cascade. POSHL1 is a potential proto-oncogene/oncogene, thus a clinically useful diagnostic marker and potential therapeutic agent for cancer.

### EXAMPLE 2

### Preparation and Labeling of Useful Fragments of Human POSHL1

[0495] Useful fragments of human POSHL1 are produced by PCR, using standard techniques, or solid phase chemical synthesis using an automated nucleic acid synthesizer. Each fragment is sequenced, confirming the exact chemical structure thereof.

[0496] The exact chemical structure of preferred fragments is provided in the attached SEQUENCE LISTING, the disclosure of which is incorporated herein by reference in its entirety. The following summary identifies the fragments whose structures are more fully described in the SEQUENCE LISTING:

[0497] SEQ ID NO: 1 (nt, full length POSHL cDNA)

[0498] SEQ ID NO: 2 (nt, cDNA ORF)

[0499] SEQ ID NO: 3 (aa, full length POSHL protein)

[0500] SEQ ID NO: 4 (nt, (nt 1-2086) portion of POSHL)

[0501] SEQ ID NO: 5 (nt, 5′ UT portion of SEQ ID NO: 4)

[0502] SEQ ID NO: 6 (nt, coding region of SEQ ID NO: 4)

[0503] SEQ ID NO: 7 (aa, (aa 1-618) CDS entirely within portion of POSHL)

[0504] SEQ ID NO: 8-17 (nt, exons 1-10 (from genomic sequence))

[0505] SEQ ID NO: 18-27 (nt, 500 bp genomic amplicons centered about exons 1-10)

[0506] SEQ ID NO: 28 (nt, 1000 bp putative promoter)

[0507] SEQ ID NOs: 29-2098 (nt, 17-mers scanning nt 1-2086 portion of POSHL)

[0508] SEQ ID NOs: 2099-4160 (nt, 25-mers scanning nt 1-2086 portion of POSHL)

[0509] SEQ ID NO: 4161 (nt, forward primer for RT-PCR analysis)

[0510] SEQ ID NO: 4162 (nt, reverse primer for RT-PCR analysis)

[0511] Upon confirmation of the exact structure, each of the above-described nucleic acids of confirmed structure is recognized to be immediately useful as a human POSHL1-specific probe.

[0512] For use as labeled nucleic acid probes, the above-described human POSHL1 nucleic acids are separately labeled by random priming. As is well known in the art of molecular biology, random priming places the investigator in possession of a near-complete set of labeled fragments of the template of varying length and varying starting nucleotide.

[0513] The labeled probes are used to identify the human POSHL1 gene on a Southern blot, and are used to measure expression of human POSHL1 mRNA on a northern blot and by RT-PCR, using standard techniques.

### EXAMPLE 3

### Expression Analysis of Human POSHL1 by RT-PCR

[0514] RT-PCR analysis was used to determine the expression pattern of the human POSHL1 gene. A forward primer (5′-TTTCCGGCTAGTGCCTAATGTCA-3′; SEQ ID NO: 4161) and a reverse primer (5′-TCCGGTGAGTTTGGCTCTACAAA-3′; SEQ ID NO: 4162) derived from the open reading frame of POSHL1 were used in standard RT-PCRs (Sambrook et al., Molecular cloning: 3rd edition, 2001). Templates for the PCRs were obtained from brain, testis, lung, skeletal muscle, bone marrow, and adrenal gland, and reactions were carried out according to the following schedule: 94° C., 20 seconds; 65° C. 20 seconds; 72° C., 60 seconds, for 35 cycles). PCR products were separated on an agarose gel and visualized with a Typhoon™ fluorimager and Imagequant software (Amersham Biosciences, Sunnyvale, Calif.). RT-PCR product for POSHL1 was found to be present most highly in skeletal muscle, but was also present in brain, testis, lung, bone marrow and adrenal gland (FIG. 4).

### EXAMPLE 4

### Production of Human POSHL1 Protein

[0515] The full length human POSHL1 cDNA clone is cloned into the mammalian expression vector pcDNA3.1/HISA (Invitrogen, Carlsbad, Calif., USA), transfected into COS7 cells, transfectants selected with G418, and protein expression in transfectants confirmed by detection of the anti-Xpress™ epitope according to manufacturer's instructions. Protein is purified using immobilized metal affinity chromatography and vector-encoded protein sequence is then removed with enterokinase, per manufacturer's instructions, followed by gel filtration and/or HPLC.

[0516] Following epitope tag removal, human POSHL1 protein is present at a concentration of at least 70%, measured on a weight basis with respect to total protein (i.e., w/w), and is free of acrylamide monomers, bis acrylamide monomers, polyacrylamide and ampholytes. Further HPLC purification provides human POSHL1 protein at a concentration of at least 95%, measured on a weight basis with respect to total protein (i.e., w/w).

### EXAMPLE 5

### Production of Anti-Human POSHL1 Antibody

[0517] Purified proteins prepared as in Example 4 are conjugated to carrier proteins and used to prepare murine monoclonal antibodies by standard techniques. Initial screening with the unconjugated purified proteins, followed by competitive inhibition screening using peptide fragments of the human POSHL1, identifies monoclonal antibodies with specificity for human POSHL1.

### EXAMPLE 6

### Use of Human POSHL1 Probes and Antibodies for Cancer

[0518] After informed consent is obtained, samples are drawn from tumor tissues and cells and tested for human POSHL1 mRNA levels by standard techniques and tested additionally for human POSHL1 protein levels using anti-human POSHL1 antibodies in a standard ELISA.

### EXAMPLE 7

### Use of Human POSHL1 Nucleic Acids, Proteins, and Antibodies in Therapy

[0519] Once over-expression of human POSHL1 is detected in patients, human POSHL1 antisense RNA or human POSHL1-specific antibody is introduced into disease cells to reduce the amount of the protein.

[0520] Once mutations of human POSHL1 have been detected in patients, normal human POSHL1 is reintroduced into the patient's disease cells by introduction of expression vectors that drive human POSHL1 expression or by introducing human POSHL1 proteins into cells. Antibodies for the mutated forms of human POSHL1 are used to block the function of the abnormal forms of the protein.

### EXAMPLE 8

### Human POSHL1 Disease Associations

[0521] Diseases that map to the human POSHL1 chromosomal region are shown in Table 3. Mutations of POSHL1 might lead to the disease(s) listed below. Alternatively, mutations of POSHL1 might lead to some other human disorder(s) as well.

TABLE 3
Diseases mapped to human chromosome 5q32 (BOSHL1 region).

| | | chromosomal |
|---|---|---|
| mim_num | Disease | location |
| 131400 | FAMILIAL EOSINOPHILIA | 5q31-q33 |
| 181460 | SCHISTOSOMA MANSONI INFECTION, | 5q31-q33 |
| | SUSCEPTIBTLITY/RESISTANCE TO | |
| 248310 | MALARIA, INTENSITY OF INFECTION | |
| | IN | |
| 600131 | CHILDHOOD ABSENCE EPILEPSY | 5q31.1-g33.1 |
| 600807 | ASTHMA | 5q31-g33 |
| 601596 | CHARCOT-MARIE-TOOTH | 5q32 |
| | NEUROPATHY, DEMYELINATING | |
| 602089 | HEMANGIOMA, CAPILLARY | 5q31-q33 |
| | INFANTILE | |
| 603165 | DERMATITIS, ATOPIC | 5q31-q33 |
| 606070 | MYOPATHY, DISTAL 2 | 5q |

[0522] All patents, patent publications, and other published references mentioned herein are hereby incorporated by reference in their entireties as if each had been individually and specifically incorporated by reference herein. While preferred illustrative embodiments of the present invention are decribed one skilled in the art will appreciate that the present invention can be practiced by other than the described embodiments, which are presented for purposes of illustration only and not by way of limitation. The present invention is limited only by the claims that follow.

The application's sequence listing, which the Patent Office published only in electronic form, follows.

SEQUENCE LISTING (4162 sequences)

SEQ ID NO: 1 - DNA, 2497 bp, Homo sapiens
aaagttttcaaagcggttggcagcagcggcgcttggaggaaaggaagccggttggagggcgcagcgcacccctgctgcgcggaggagggggctgagctgaactcagcagaagttacatgcacaaggcaaaaattctgacgttctcaagagaccagctctgcccccgtggctcaactgaccctaccatgtggacgctgctcctccaggtgggaactggagttttgaaataaaatggatgatttgacgttacttgatcttctggagtgccctgtgtgctttgagaagctcgatgtcacagccaaagtcctcccttgccagcacaccttctgcaaaccatgtctacagagggttttcaaggcccacaaagagctgcggtgccccgaatgcaggacgcctgtgttttccaacattgaggcgctgccggccaacctgctgctcgtgcgccttctggatggagtgcgctcagggcagagctccgggagagggggctccttccgcaggcctggcacgatgaccttgcaggatggcaggaaaagcaggaccaaccccagacgtctgcaggccagtcctttccggctagtgcctaatgtcagaatccacatggatggggtgcctcgagcaaaggccttatgcaactacagagggcagaatcccggtgacctaaggtttaataagggagatatcatccttctccggagacagcttgatgagaattggtaccagggggaaatcaatggcatcagcgggaacttcccagccagctccgtggaagtcatcaagcagctgccccagccgcccccgctctgcagggccctctacaacttcgacctacgaggcaaggacaagagtgagaaccaggattgcctgaccttcctcaaggacgatatcatcactgtgatcagccgagtggatgagaactgggcagaaggcaagttaggagataaagtaggcatcttccctatcttgtttgtagagccaaacctcaccgcaagacaccttttagagaagaacaaaggtcgccagtcatcctgcacaaaaaacctgtccctggtgtcctcgtcctccagaggcaacacgtctaccctccgtaggggcccagggtccaggaggaaggtgcctgggcagttttccatcacaacagccttgaacactctcaaccggatggtccattctccttcagggcgccatatggtagagatcagcaccccagtgctcatcagctccagcaacccctctgtgatcacccagcccatggagaaagcagacgttccttccagctgtgtgggacaggtcagcacttatcaccccgcacctgtctctccaggacattccacagccgtggtcagtctgcctggctcccagcaacacctctcagcgaacatgtttgtagccctgcactcctactcagcccatggacccgatgagctggacctgcaaaagggagaaggcgtcagggtcctggggaagtgccaggacggctggctcaggggcgtctccttggtcaccgggcgagtcggcatcttcccaaacaattacgtcatccccattttcagaaagacctctagttttccagactcccggagccctggtctctacaccacatggacgttatccacctcctctgtgtcctcccaaggcagcatttcagaaggtgatccacggcaaagccgtcccttcaaatccgtctttgtgcccactgccatagtcaaccccgtgagaagcacagccggccctgggactttaggacaagggtctcttcggaaagggcggagcagcatgagaaagaatggatccctgcagagacccctccagtccgggatccccactctcgtggtaggctccctcagacgcagccccaccatggtccttcggcctcagcagttccaattctaccagccacaggggatcccctcctccccctcagccgtggtggtggagatggggtccaagcctgccctcacgggggagcccgccctcacgtgcatcagcaggggcagtgaggcccggacccactccgcggccagctccctcattatggaagacaaagaaatccccatcaagagtgagcctctgccaaaaccgcccgcatctgccccaccatccatcctggtgaaaccagaaaactcaagaaatggcatcgaaaagcaagtcaaaaccgtgagatttcagaattacagccctcctcccaccaaacattacacctcccatcccacctccggaaagcctgaacagccagccaccctcaaggcgtcccagcctgaagcagcgtccttgggcccagagatgaccgtcctatttgcccaccgaagtggctgccactccggacagcagacagacctccggagaaagtcagctcttgccaaggccacaaccctggtgtccactgcctcaggcacgcagaccgtgtttcccagcaaatgaacctacgggtgacttttcctagaccccaaagaggtgaattgcatttaaatacagtctgcctccactaaaaaaaaaa

SEQ ID NO: 2 - DNA, 2190 bp, Homo sapiens
atggatgatttgacgttacttgatcttctggagtgccctgtgtgctttgagaagctcgatgtcacagccaaagtcctcccttgccagcacaccttctgcaaaccatgtctacagagggttttcaaggcccacaaagagctgcggtgccccgaatgcaggacgcctgtgttttccaacattgaggcgctgccggccaacctgctgctcgtgcgccttctggatggagtgcgctcagggcagagctccgggagagggggctccttccgcaggcctggcacgatgaccttgcaggatggcaggaaaagcaggaccaaccccagacgtctgcaggccagtcctttccggctagtgcctaatgtcagaatccacatggatggggtgcctcgagcaaaggccttatgcaactacagagggcagaatcccggtgacctaaggtttaataagggagatatcatccttctccggagacagcttgatgagaattggtaccagggggaaatcaatggcatcagcgggaacttcccagccagctccgtggaagtcatcaagcagctgccccagccgcccccgctctgcagggccctctacaacttcgacctacgaggcaaggacaagagtgagaaccaggattgcctgaccttcctcaaggacgatatcatcactgtgatcagccgagtggatgagaactgggcagaaggcaagttaggagataaagtaggcatcttccctatcttgtttgtagagccaaacctcaccgcaagacaccttttagagaagaacaaaggtcgccagtcatcctgcacaaaaaacctgtccctggtgtcctcgtcctccagaggcaacacgtctaccctccgtaggggcccagggtccaggaggaaggtgcctgggcagttttccatcacaacagccttgaacactctcaaccggatggtccattctccttcagggcgccatatggtagagatcagcaccccagtgctcatcagctccagcaacccctctgtgatcacccagcccatggagaaagcagacgttccttccagctgtgtgggacaggtcagcacttatcaccccgcacctgtctctccaggacattccacagccgtggtcagtctgcctggctcccagcaacacctctcagcgaacatgtttgtagccctgcactcctactcagcccatggacccgatgagctggacctgcaaaagggagaaggcgtcagggtcctggggaagtgccaggacggctggctcaggggcgtctccttggtcaccgggcgagtcggcatcttcccaaacaattacgtcatccccattttcagaaagacctctagttttccagactcccggagccctggtctctacaccacatggacgttatccacctcctctgtgtcctcccaaggcagcatttcagaaggtgatccacggcaaagccgtcccttcaaatccgtctttgtgcccactgccatagtcaaccccgtgagaagcacagccggccctgggactttaggacaagggtctcttcggaaagggcggagcagcatgagaaagaatggatccctgcagagacccctccagtccgggatccccactctcgtggtaggctccctcagacgcagccccaccatggtccttcggcctcagcagttccaattctaccagccacaggggatcccctcctccccctcagccgtggtggtggagatggggtccaagcctgccctcacgggggagcccgccctcacgtgcatcagcaggggcagtgaggcccggacccactccgcggccagctccctcattatggaagacaaagaaatccccatcaagagtgagcctctgccaaaaccgcccgcatctgccccaccatccatcctggtgaaaccagaaaactcaagaaatggcatcgaaaagcaagtcaaaaccgtgagatttcagaattacagccctcctcccaccaaacattacacctcccatcccacctccggaaagcctgaacagccagccaccctcaaggcgtcccagcctgaagcagcgtccttgggcccagagatgaccgtcctatttgcccaccgaagtggctgccactccggacagcagacagacctccggagaaagtcagctcttgccaaggccacaaccctggtgtccactgcctcaggcacgcagaccgtgtttcccagcaaatga

SEQ ID NO: 3 - protein, 729 aa, Homo sapiens
MDDLTLLDLLECPVCFEKLDVTAKVLPCQHTFCKPCLQRVFKAHKELRCPECRTPVFSNIEALPANLLLVRLLDGVRSGQSSGRGGSFRRPGTMTLQDGRKSRTNPRRLQASPFRLVPNVRIHMDGVPRAKALCNYRGQNPGDLRFNKGDIILLRRQLDENWYQGEINGISGNFPASSVEVIKQLPQPPPLCRALYNFDLRGKDKSENQDCLTFLKDDIITVISRVDENWAEGKLGDKVGIFPILFVEPNLTARHLLEKNKGRQSSCTKNLSLVSSSSRGNTSTLRRGPGSRRKVPGQFSITTALNTLNRMVHSPSGRHMVEISTPVLISSSNPSVITQPMEKADVPSSCVGQVSTYHPAPVSPGHSTAVVSLPGSQQHLSANMFVALHSYSAHGPDELDLQKGEGVRVLGKCQDGWLRGVSLVTGRVGIFPNNYVIPIFRKTSSFPDSRSPGLYTTWTLSTSSVSSQGSISEGDPRQSRPFKSVFVPTAIVNPVRSTAGPGTLGQGSLRKGRSSMRKNGSLQRPLQSGIPTLVVGSLRRSPTMVLRPQQFQFYQPQGIPSSPSAVVVEMGSKPALTGEPALTCISRGSEARTHSAASSLIMEDKEIPIKSEPLPKPPASAPPSILVKPENSRNGIEKQVKTVRFQNYSPPPTKHYTSHPTSGKPEQPATLKASQPEAASLGPEMTVLFAHRSGCHSGQQTDLRRKSALAKATTLVSTASGTQTVFPSK

SEQ ID NO: 4 - DNA, 2086 bp, Homo sapiens
aaagttttcaaagcggttggcagcagcggcgcttggaggaaaggaagccggttggagggcgcagcgcacccctgctgcgcggaggagggggctgagctgaactcagcagaagttacatgcacaaggcaaaaattctgacgttctcaagagaccagctctgcccccgtggctcaactgaccctaccatgtggacgctgctcctccaggtgggaactggagttttgaaataaaatggatgatttgacgttacttgatcttctggagtgccctgtgtgctttgagaagctcgatgtcacagccaaagtcctcccttgccagcacaccttctgcaaaccatgtctacagagggttttcaaggcccacaaagagctgcggtgccccgaatgcaggacgcctgtgttttccaacattgaggcgctgccggccaacctgctgctcgtgcgccttctggatggagtgcgctcagggcagagctccgggagagggggctccttccgcaggcctggcacgatgaccttgcaggatggcaggaaaagcaggaccaaccccagacgtctgcaggccagtcctttccggctagtgcctaatgtcagaatccacatggatggggtgcctcgagcaaaggccttatgcaactacagagggcagaatcccggtgacctaaggtttaataagggagatatcatccttctccggagacagcttgatgagaattggtaccagggggaaatcaatggcatcagcgggaacttcccagccagctccgtggaagtcatcaagcagctgccccagccgcccccgctctgcagggccctctacaacttcgacctacgaggcaaggacaagagtgagaaccaggattgcctgaccttcctcaaggacgatatcatcactgtgatcagccgagtggatgagaactgggcagaaggcaagttaggagataaagtaggcatcttccctatcttgtttgtagagccaaacctcaccgcaagacaccttttagagaagaacaaaggtcgccagtcatcctgcacaaaaaacctgtccctggtgtcctcgtcctccagaggcaacacgtctaccctccgtaggggcccagggtccaggaggaaggtgcctgggcagttttccatcacaacagccttgaacactctcaaccggatggtccattctccttcagggcgccatatggtagagatcagcaccccagtgctcatcagctccagcaacccctctgtgatcacccagcccatggagaaagcagacgttccttccagctgtgtgggacaggtcagcacttatcaccccgcacctgtctctccaggacattccacagccgtggtcagtctgcctggctcccagcaacacctctcagcgaacatgtttgtagccctgcactcctactcagcccatggacccgatgagctggacctgcaaaagggagaaggcgtcagggtcctggggaagtgccaggacggctggctcaggggcgtctccttggtcaccgggcgagtcggcatcttcccaaacaattacgtcatccccattttcagaaagacctctagttttccagactcccggagccctggtctctacaccacatggacgttatccacctcctctgtgtcctcccaaggcagcatttcagaaggtgatccacggcaaagccgtcccttcaaatccgtctttgtgcccactgccatagtcaaccccgtgagaagcacagccggccctgggactttaggacaagggtctcttcggaaagggcggagcagcatgagaaagaatggatccctgcagagacccctccagtccgggatccccactctcgtggtaggctccctcagacgcagccccaccatggtccttcggcctcagcagttccaattctaccagccacaggggatcccctcctccccctcagccgtggtggtggagatggggtccaagcctgccctcacgggggagcccgccctcacgtgcatcagcaggggcagtgaggcccggacccactccgcggccagctccctcattatggaagacaaagaaatccccatcaagagtgagcctctgccaaaaccgcccg

SEQ ID NO: 5 - DNA, 231 bp, Homo sapiens
aaagttttcaaagcggttggcagcagcggcgcttggaggaaaggaagccggttggagggcgcagcgcacccctgctgcgcggaggagggggctgagctgaactcagcagaagttacatgcacaaggcaaaaattctgacgttctcaagagaccagctctgcccccgtggctcaactgaccctaccatgtggacgctgctcctccaggtgggaactggagttttgaaataaa

SEQ ID NO: 6 - DNA, 1855 bp, Homo sapiens
atggatgatttgacgttacttgatcttctggagtgccctgtgtgctttgagaagctcgatgtcacagccaaagtcctcccttgccagcacaccttctgcaaaccatgtctacagagggttttcaaggcccacaaagagctgcggtgccccgaatgcaggacgcctgtgttttccaacattgaggcgctgccggccaacctgctgctcgtgcgccttctggatggagtgcgctcagggcagagctccgggagagggggctccttccgcaggcctggcacgatgaccttgcaggatggcaggaaaagcaggaccaaccccagacgtctgcaggccagtcctttccggctagtgcctaatgtcagaatccacatggatggggtgcctcgagcaaaggccttatgcaactacagagggcagaatcccggtgacctaaggtttaataagggagatatcatccttctccggagacagcttgatgagaattggtaccagggggaaatcaatggcatcagcgggaacttcccagccagctccgtggaagtcatcaagcagctgccccagccgcccccgctctgcagggccctctacaacttcgacctacgaggcaaggacaagagtgagaaccaggattgcctgaccttcctcaaggacgatatcatcactgtgatcagccgagtggatgagaactgggcagaaggcaagttaggagataaagtaggcatcttccctatcttgtttgtagagccaaacctcaccgcaagacaccttttagagaagaacaaaggtcgccagtcatcctgcacaaaaaacctgtccctggtgtcctcgtcctccagaggcaacacgtctaccctccgtaggggcccagggtccaggaggaaggtgcctgggcagttttccatcacaacagccttgaacactctcaaccggatggtccattctccttcagggcgccatatggtagagatcagcaccccagtgctcatcagctccagcaacccctctgtgatcacccagcccatggagaaagcagacgttccttccagctgtgtgggacaggtcagcacttatcaccccgcacctgtctctccaggacattccacagccgtggtcagtctgcctggctcccagcaacacctctcagcgaacatgtttgtagccctgcactcctactcagcccatggacccgatgagctggacctgcaaaagggagaaggcgtcagggtcctggggaagtgccaggacggctggctcaggggcgtctccttggtcaccgggcgagtcggcatcttcccaaacaattacgtcatccccattttcagaaagacctctagttttccagactcccggagccctggtctctacaccacatggacgttatccacctcctctgtgtcctcccaaggcagcatttcagaaggtgatccacggcaaagccgtcccttcaaatccgtctttgtgcccactgccatagtcaaccccgtgagaagcacagccggccctgggactttaggacaagggtctcttcggaaagggcggagcagcatgagaaagaatggatccctgcagagacccctccagtccgggatccccactctcgtggtaggctccctcagacgcagccccaccatggtccttcggcctcagcagttccaattctaccagccacaggggatcccctcctccccctcagccgtggtggtggagatggggtccaagcctgccctcacgggggagcccgccctcacgtgcatcagcaggggcagtgaggcccggacccactccgcggccagctccctcattatggaagacaaagaaatccccatcaagagtgagcctctgccaaaaccgcccg

SEQ ID NO: 7 - protein, 618 aa, Homo sapiens
MDDLTLLDLLECPVCFEKLDVTAKVLPCQHTFCKPCLQRVFKAHKELRCPECRTPVFSNIEALPANLLLVRLLDGVRSGQSSGRGGSFRRPGTMTLQDGRKSRTNPRRLQASPFRLVPNVRIHMDGVPRAKALCNYRGQNPGDLRFNKGDIILLRRQLDENWYQGEINGISGNFPASSVEVIKQLPQPPPLCRALYNFDLRGKDKSENQDCLTFLKDDIITVISRVDENWAEGKLGDKVGIFPILFVEPNLTARHLLEKNKGRQSSCTKNLSLVSSSSRGNTSTLRRGPGSRRKVPGQFSITTALNTLNRMVHSPSGRHMVEISTPVLISSSNPSVITQPMEKADVPSSCVGQVSTYHPAPVSPGHSTAVVSLPGSQQHLSANMFVALHSYSAHGPDELDLQKGEGVRVLGKCQDGWLRGVSLVTGRVGIFPNNYVIPIFRKTSSFPDSRSPGLYTTWTLSTSSVSSQGSISEGDPRQSRPFKSVFVPTAIVNPVRSTAGPGTLGQGSLRKGRSSMRKNGSLQRPLQSGIPTLVVGSLRRSPTMVLRPQQFQFYQPQGIPSSPSAVVVEMGSKPALTGEPALTCISRGSEARTHSAASSLIMEDKEIPIKSEPLPKPP

SEQ ID NO: 8 - DNA, 125 bp, Homo sapiens
aaagttttcaaagcggttggcagcagcggcgcttggaggaaaggaagccggttggagggcgcagcgcacccctgctgcgcggaggagggggctgagctgaactcagcagaagttacatgcacaag

SEQ ID NO: 9 - DNA, 484 bp, Homo sapiens
gcaaaaattctgacgttctcaagagaccagctctgcccccgtggctcaactgaccctaccatgtggacgctgctcctccaggtgggaactggagttttgaaataaaatggatgatttgacgttacttgatcttctggagtgccctgtgtgctttgagaagctcgatgtcacagccaaagtcctcccttgccagcacaccttctgcaaaccatgtctacagagggttttcaaggcccacaaagagctgcggtgccccgaatgcaggacgcctgtgttttccaacattgaggcgctgccggccaacctgctgctcgtgcgccttctggatggagtgcgctcagggcagagctccgggagagggggctccttccgcaggcctggcacgatgaccttgcaggatggcaggaaaagcaggaccaaccccagacgtctgcaggccagtcctttccggctagtgcctaatgtcagaatccacatggatggg

SEQ ID NO: 10 - DNA, 270 bp, Homo sapiens
gtgcctcgagcaaaggccttatgcaactacagagggcagaatcccggtgacctaaggtttaataagggagatatcatccttctccggagacagcttgatgagaattggtaccagggggaaatcaatggcatcagcgggaacttcccagccagctccgtggaagtcatcaagcagctgccccagccgcccccgctctgcagggccctctacaacttcgacctacgaggcaaggacaagagtgagaaccaggattgcctgaccttcctcaag

SEQ ID NO: 11 - DNA, 96 bp, Homo sapiens
gacgatatcatcactgtgatcagccgagtggatgagaactgggcagaaggcaagttaggagataaagtaggcatcttccctatcttgtttgtagag

SEQ ID NO: 12 - DNA, 315 bp, Homo sapiens
ccaaacctcaccgcaagacaccttttagagaagaacaaaggtcgccagtcatcctgcacaaaaaacctgtccctggtgtcctcgtcctccagaggcaacacgtctaccctccgtaggggcccagggtccaggaggaaggtgcctgggcagttttccatcacaacagccttgaacactctcaaccggatggtccattctccttcagggcgccatatggtagagatcagcaccccagtgctcatcagctccagcaacccctctgtgatcacccagcccatggagaaagcagacgttccttccagctgtgtgggacag

SEQ ID NO: 13 - DNA, 92 bp, Homo sapiens
gtcagcacttatcaccccgcacctgtctctccaggacattccacagccgtggtcagtctgcctggctcccagcaacacctctcagcgaacat

SEQ ID NO: 14 - DNA, 171 bp, Homo sapiens
gtttgtagccctgcactcctactcagcccatggacccgatgagctggacctgcaaaagggagaaggcgtcagggtcctggggaagtgccaggacggctggctcaggggcgtctccttggtcaccgggcgagtcggcatcttcccaaacaattacgtcatccccattttcag

SEQ ID NO: 15 - DNA, 233 bp, Homo sapiens
aaagacctctagttttccagactcccggagccctggtctctacaccacatggacgttatccacctcctctgtgtcctcccaaggcagcatttcagaaggtgatccacggcaaagccgtcccttcaaatccgtctttgtgcccactgccatagtcaaccccgtgagaagcacagccggccctgggactttaggacaagggtctcttcggaaagggcggagcagcatgagaaaga

SEQ ID NO: 16 - DNA, 359 bp, Homo sapiens
atggatccctgcagagacccctccagtccgggatccccactctcgtggtaggctccctcagacgcagccccaccatggtccttcggcctcagcagttccaattctaccagccacaggggatcccctcctccccctcagccgtggtggtggagatggggtccaagcctgccctcacgggggagcccgccctcacgtgcatcagcaggggcagtgaggcccggacccactccgcggccagctccctcattatggaagacaaagaaatccccatcaagagtgagcctctgccaaaaccgcccgcatctgccccaccatccatcctggtgaaaccagaaaactcaagaaatggcatcgaaaag

SEQ ID NO: 17 - DNA, 342 bp, Homo sapiens
caagtcaaaaccgtgagatttcagaattacagccctcctcccaccaaacattacacctcccatcccacctccggaaagcctgaacagccagccaccctcaaggcgtcccagcctgaagcagcgtccttgggcccagagatgaccgtcctatttgcccaccgaagtggctgccactccggacagcagacagacctccggagaaagtcagctcttgccaaggccacaaccctggtgtccactgcctcaggcacgcagaccgtgtttcccagcaaatgaacctacgggtgacttttcctagaccccaaagaggtgaattgcatttaaatacagtctgcctccact

SEQ ID NO: 18 - DNA, 500 bp, Homo sapiens
cttagggactggcttatattttacctcttacaatcttttcccagaagcaattcagtaaactgaaggaaagatcataaagttaacaactgcaacaacaaaagcgtggtaagtaggcagcgccctggcagtgaaagcgttaacagggctgggtaaggcgatcccttgaaatgagtaagactgagtggttaaagttttcaaagcggttggcagcagcggcgcttggaggaaaggaagccggttggagggcgcagcgcacccctgctgcgcggaggagggggctgagctgaactcagcagaagttacatgcacaaggttagtggcccccacacgcctccccagcccgctgccgcgctgacatctttggagaggaggcttaggaaggcgaggcgccatcgctcattctcggtcgtgtctgtcctgcttactagtcgctagtggggccactggccttctcgccaaacctctgggctcggtgcttaccgaagccctggcacttgtga

SEQ ID NO: 19 - DNA, 500 bp, Homo sapiens
caagcaggcaaaaattctgacgttctcaagagaccagctctgcccccgtggctcaactgaccctaccatgtggacgctgctcctccaggtgggaactggagttttgaaataaaatggatgatttgacgttacttgatcttctggagtgccctgtgtgctttgagaagctcgatgtcacagccaaagtcctcccttgccagcacaccttctgcaaaccatgtctacagagggttttcaaggcccacaaagagctgcggtgccccgaatgcaggacgcctgtgttttccaacattgaggcgctgccggccaacctgctgctcgtgcgccttctggatggagtgcgctcagggcagagctccgggagagggggctccttccgcaggcctggcacgatgaccttgcaggatggcaggaaaagcaggaccaaccccagacgtctgcaggccagtcctttccggctagtgcctaatgtcagaatccacatggatggggtaagagag

SEQ ID NO: 20 - DNA, 500 bp, Homo sapiens
actcagtatttgcaaagcatgttaaagcaaagtacaataaaagggggaatgcttgtatcttctgttcctctagactctaagctaagtacatatcttattggtctgtgccattgcaggtgcctcgagcaaaggccttatgcaactacagagggcagaatcccggtgacctaaggtttaataagggagatatcatccttctccggagacagcttgatgagaattggtaccagggggaaatcaatggcatcagcgggaacttcccagccagctccgtggaagtcatcaagcagctgccccagccgcccccgctctgcagggccctctacaacttcgacctacgaggcaaggacaagagtgagaaccaggattgcctgaccttcctcaaggtaggattctgggtggccaccagagtcacctgggaccacgtagagaccatagcagaacagagttccttgtttaatatttgctgattttaaaaaattgtattttaaatatattat

SEQ ID NO: 21 - DNA, 500 bp, Homo sapiens
gtctacccctctatggtctcagtgacacaaacactgccctttatggagaaagttcattttagcaaaaagacttcccaaataaatcaagcacaagctacattcctaacactttacaccatctgagactccaaactgatctctgctgagagcttttactgcctgaaaatgagagtaaatgctgaccatgagactttctctttcaggacgatatcatcactgtgatcagccgagtggatgagaactgggcagaaggcaagttaggagataaagtaggcatcttccctatcttgtttgtagaggtacgtgagtatcaagtctacatctgatttacgcatacacagaaatattcatgtgctacagtgatgcctgagagcaattcctatttgctatgaggcttatttcagaactaactaaaatctctaaagaaaagatgccagacaataatacccaattctggcaagagtctggggaaatgagccttttctattctcctgatggga

SEQ ID NO: 22 - DNA, 500 bp, Homo sapiens
acctgacctggcttcagatgtacatgggtaggaactggctactcacattagatcaggaagacaaacttctcattggaccttttgtcttttcagccaaacctcaccgcaagacaccttttagagaagaacaaaggtcgccagtcatcccgcacaaaaaacctgtccctggtgtcctcgtcctccagaggcaacacgtctaccctccgtaggggcccagggtccaggaggaaggtgcctgggcagttttccatcacaacagccttgaacactctcaaccggatggtccattctccttcagggcgccatatggtagagatcagcaccccagtgctcatcagctccagcaacccctctgtgatcacccagcccatggagaaagcagacgttccttccagctgtgtgggacaggtagggaagaaacgcctgggatgagggcactttggagttgggcaagtgattcataccatgtcacaaccaatatttgatgtttagtacttgct

SEQ ID NO: 23 - DNA, 500 bp, Homo sapiens
ccaccccaccaggccataaaccagctcctccccacctccctgtgcccacagccacaaaccacagagaggacgcacaatgggtggcaccaggcatggctgttggttttcagctgtgtcaggtctttctacgtagctgctctgtttgctgtgggcctgggttgtggcattcattggttctgcttggctgtcttttctgtctgtgcaggtcagcacttatcaccccgcacctgtctctccaggacattccacagccgtggtcagtctgcctggctcccagcaacacctctcagcgaacatgtgagtaaaaggctcatcccttcacccaagtcctggcacaaaggggtcatctttaccatgtacagtggtgatctagcatcaccattcccaaaacatcccatccagagacaataggtcgccttcctttaccacttccaagtgaaataatggtgaaaaacagaaattagggccaggcgcagtggctcacacctgtaatcccagca

SEQ ID NO: 24 - DNA, 500 bp, Homo sapiens
gcctcccgaactgctgggattagaggtgagaaccaccgcacccgctcgaccaagaaggttcttattgctaaccactgggcagtctctctccaccattcccccactccatgccccccatcaggcacgtcttccttcctccctcaccagttctctgtgtcttcccaggtttgtagccctgcactcctactcagcccatggacccgatgagctggacctgcaaaagggagaaggcgtcagggtcctggggaagtgccaggacggctggctcaggggcgtctccttggtcaccgggcgagtcggcatcttcccaaacaattacgtcatccccattttcaggtgtgtcgcctccaatcccagactttgggaggttgggccaccctaggccaggggccatctgtgggttgaactggtggaagacccagtgctctttcagaaaacaggccaagaaagcgctttttgctctataacccgcctatctcttttaaaacaaaatagcaaaa

SEQ ID NO: 25 - DNA, 500 bp, Homo sapiens
tatgggtgggaagaaggtgagaagtagccacatttggtatgtggttgggagctgataggtttttaaataggactcttgactgaacattttctttctctatttcttctcttaaaaaaaaaattttccaaaaccagaaagacctctagttttccagactcccggagccctggtctctacaccacatggacgttatccacctcctctgtgtcctcccaaggcagcatttcagaaggtgatccacggcaaagccgtcccttcaaatccgtctttgtgcccactgccatagtcaaccccgtgagaagcacagccggccctgggactttaggacaagggtctcttcggaaagggcggagcagcatgagaaagagtaagtggtggcagagaggtacgtgcctagagctaagtgatggggggaatctgacccaggggtacacaggatgctttttgcaaaaacaggatcttggctttaaactaagcccctgcaaagggtattatacaat

SEQ ID NO: 26 - DNA, 500 bp, Homo sapiens
gcttacccagccccacccaacctactgccagccgcccctgctgctgatctctctgtcctataattccccagatggatccctgcagagacccctccagtccgggatccccactctcgtggtaggctccctcagacgcagccccaccatggtccttcggcctcagcagttccaattctaccagccacaggggatcccctcctccccctcagccgtggtggtggagatggggtccaagcctgccctcacgggggagcccgccctcacgtgcatcagcaggggcagtgaggcccggatccactccgcggccagctccctcattatggaagacaaagaaatccccatcaagagtgagcctctgccaaaaccgcccgcatctgccccaccatccatcctggtgaaaccagaaaactcaagaaatggcatcgaaaaggtaggatcagagtgacattgggggcccaactctttcgatcccgtactatgcatagtgtctcagctcagag

SEQ ID NO: 27 - DNA, 500 bp, Homo sapiens
acatttcaagtggggacaagcatggggaaatagacatctcccacctcacctgtgtccatttcctctcctttctcttgcagcaagtcaaaaccgtgagatttcagaattacagccctcctcccaccaaacattacacctcccatcccacctccggaaagcctgaacagccagccaccctcaaggcgtcccagcctgaagcagcgtccttgggcccagagatgaccatcctatttgcccaccgaagtggctgccactccggacagcagacagacctccggagaaagtcagctcttgccaaggccacaaccctggtgtccactgcctcaggcacgcagaccgtgtttcccagcaaatgaacctacgggtggcttttcctagaccccaaagaggtgaattgcatttaaatacagtctgcctccactgagggcatcctgccattctttggggacttgagcatgggtccttgttcttcctatttcacctccaggaaagcaaaagtg

SEQ ID NO: 28 - DNA, 1000 bp, Homo sapiens
atctcctgaccttgtgatctgcccacgtcggcctcccaaagtgttgggattacaggcatgagccactgcgcctggccagcctcttaaagttatatcactccatgacattgttaagagcacagcccacttgccttctgctagctgtgactcccgagatgagttatttatcctctctgtgtctcaagttccctcatctgcaagatgaaagtaaagaatagtttagtgtctccttgggttgttaaggggttaaagggctaacacaggtaaggtatttagaacagtggttgacacagataaggactaccctggcattaagattgttattattcacttaatcggatacctttgtaattttacatgaaatgtattatcgataaatcaaaaaatagaaatataggcataatctgaggatatgaaaagactacagtggataacaggcaggaggagagcttggaggccactgcttttccttttttgaaaaagcttctctgtgctttgatttttcacgtatgtgtatatacgtgacactagttttttaatttaaacagattgagcaaaaagatcactaaagtccctcttatctctaaattcagagattgactatgattttcaaagagcaatattttctaggtgtccgacttatccttgttttcatagcttgaccatttttacttttgaccttcccaggaaatccttatgaagatttaaaataaacacaatcactttggtatgtttataatggagcaggttctgactccttggatactacagaaaacgggaaaggtgaaaatatgaactttgtaaatacttggccttagggactggcttatattttacctcttacaatcttttcccagaagcaattcagtaaactgaaggaaagatcataaagttaacaactgcaacaacaaaagcgtggtaagtaggcagcgccctggcagtgaaagcgttaacagggctgggtaaggcgatcccttgaaatgagtaagactgagtggtt

SEQ ID NO: 29 - DNA, 17 bp, Homo sapiens
aaagttttcaaagcggt

SEQ ID NO: 30 - DNA, 17 bp, Homo sapiens
aagttttcaaagcggtt

SEQ ID NO: 31 - DNA, 17 bp, Homo sapiens
agttttcaaagcggttg

SEQ ID NO: 32 - DNA, 17 bp, Homo sapiens
gttttcaaagcggttgg

SEQ ID NO: 33 - DNA, 17 bp, Homo sapiens
ttttcaaagcggttggc

SEQ ID NO: 34 - DNA, 17 bp, Homo sapiens
tttcaaagcggttggca

SEQ ID NO: 35 - DNA, 17 bp, Homo sapiens
ttcaaagcggttggcag

SEQ ID NO: 36 - DNA, 17 bp, Homo sapiens
tcaaagcggttggcagc

SEQ ID NO: 37 - DNA, 17 bp, Homo sapiens
caaagcggttggcagca

SEQ ID NO: 38 - DNA, 17 bp, Homo sapiens
aaagcggttggcagcag

SEQ ID NO: 39 - DNA, 17 bp, Homo sapiens
aagcggttggcagcagc

SEQ ID NO: 40 - DNA, 17 bp, Homo sapiens
agcggttggcagcagcg

SEQ ID NO: 41 - DNA, 17 bp, Homo sapiens
gcggttggcagcagcgg

SEQ ID NO: 42 - DNA, 17 bp, Homo sapiens
cggttggcagcagcggc

SEQ ID NO: 43 - DNA, 17 bp, Homo sapiens
ggttggcagcagcggcg

SEQ ID NO: 44 - DNA, 17 bp, Homo sapiens
gttggcagcagcggcgc

SEQ ID NO: 45 - DNA, 17 bp, Homo sapiens
ttggcagcagcggcgct

SEQ ID NO: 46 - DNA, 17 bp, Homo sapiens
tggcagcagcggcgctt

SEQ ID NO: 47 - DNA, 17 bp, Homo sapiens
ggcagcagcggcgcttg

SEQ ID NO: 48 - DNA, 17 bp, Homo sapiens
gcagcagcggcgcttgg

SEQ ID NO: 49 - DNA, 17 bp, Homo sapiens
cagcagcggcgcttgga

SEQ ID NO: 50 - DNA, 17 bp, Homo sapiens
agcagcggcgcttggag

SEQ ID NO: 51 - DNA, 17 bp, Homo sapiens
gcagcggcgcttggagg

SEQ ID NO: 52 - DNA, 17 bp, Homo sapiens
cagcggcgcttggagga

SEQ ID NO: 53 - DNA, 17 bp, Homo sapiens
agcggcgcttggaggaa

SEQ ID NO: 54 - DNA, 17 bp, Homo sapiens
gcggcgcttggaggaaa

SEQ ID NO: 55 - DNA, 17 bp, Homo sapiens
cggcgcttggaggaaag

SEQ ID NO: 56 - DNA, 17 bp, Homo sapiens
ggcgcttggaggaaagg

SEQ ID NO: 57 - DNA, 17 bp, Homo sapiens
gcgcttggaggaaagga

SEQ ID NO: 58 - DNA, 17 bp, Homo sapiens
cgcttggaggaaaggaa

SEQ ID NO: 59 - DNA, 17 bp, Homo sapiens
gcttggaggaaaggaag

SEQ ID NO: 60 - DNA, 17 bp, Homo sapiens
cttggaggaaaggaagc

SEQ ID NO: 61 - DNA, 17 bp, Homo sapiens
ttggaggaaaggaagcc

SEQ ID NO: 62 - DNA, 17 bp, Homo sapiens
tggaggaaaggaagccg

SEQ ID NO: 63 - DNA, 17 bp, Homo sapiens
ggaggaaaggaagccgg

SEQ ID NO: 64 - DNA, 17 bp, Homo sapiens
gaggaaaggaagccggt

SEQ ID NO: 65 - DNA, 17 bp, Homo sapiens
aggaaaggaagccggtt

SEQ ID NO: 66 - DNA, 17 bp, Homo sapiens
ggaaaggaagccggttg

SEQ ID NO: 67 - DNA, 17 bp, Homo sapiens
gaaaggaagccggttgg

SEQ ID NO: 68 - DNA, 17 bp, Homo sapiens
aaaggaagccggttgga

SEQ ID NO: 69 - DNA, 17 bp, Homo sapiens
aaggaagccggttggag

SEQ ID NO: 70 - DNA, 17 bp, Homo sapiens
aggaagccggttggagg

SEQ ID NO: 71 - DNA, 17 bp, Homo sapiens
ggaagccggttggaggg

SEQ ID NO: 72 - DNA, 17 bp, Homo sapiens
gaagccggttggagggc

SEQ ID NO: 73 - DNA, 17 bp, Homo sapiens
aagccggttggagggcg

SEQ ID NO: 74 - DNA, 17 bp, Homo sapiens
agccggttggagggcgc

SEQ ID NO: 75 - DNA, 17 bp, Homo sapiens
gccggttggagggcgca

SEQ ID NO: 76 - DNA, 17 bp, Homo sapiens
ccggttggagggcgcag

SEQ ID NO: 77 - DNA, 17 bp, Homo sapiens
cggttggagggcgcagc

SEQ ID NO: 78 - DNA, 17 bp, Homo sapiens
ggttggagggcgcagcg

SEQ ID NO: 79 - DNA, 17 bp, Homo sapiens
gttggagggcgcagcgc

SEQ ID NO: 80 - DNA, 17 bp, Homo sapiens
ttggagggcgcagcgca

SEQ ID NO: 81 - DNA, 17 bp, Homo sapiens
tggagggcgcagcgcac

SEQ ID NO: 82 - DNA, 17 bp, Homo sapiens
ggagggcgcagcgcacc

SEQ ID NO: 83 - DNA, 17 bp, Homo sapiens
gagggcgcagcgcaccc

SEQ ID NO: 84 - DNA, 17 bp, Homo sapiens
agggcgcagcgcacccc

SEQ ID NO: 85 - DNA, 17 bp, Homo sapiens
gggcgcagcgcacccct

SEQ ID NO: 86 - DNA, 17 bp, Homo sapiens
ggcgcagcgcacccctg

SEQ ID NO: 87 - DNA, 17 bp, Homo sapiens
gcgcagcgcacccctgc

SEQ ID NO: 88 - DNA, 17 bp, Homo sapiens
cgcagcgcacccctgct

SEQ ID NO: 89 - DNA, 17 bp, Homo sapiens
gcagcgcacccctgctg

SEQ ID NO: 90 - DNA, 17 bp, Homo sapiens
cagcgcacccctgctgc

SEQ ID NO: 91 - DNA, 17 bp, Homo sapiens
agcgcacccctgctgcg

SEQ ID NO: 92 - DNA, 17 bp, Homo sapiens
gcgcacccctgctgcgc

SEQ ID NO: 93 - DNA, 17 bp, Homo sapiens
cgcacccctgctgcgcg

SEQ ID NO: 94 - DNA, 17 bp, Homo sapiens
gcacccctgctgcgcgg

SEQ ID NO: 95 - DNA, 17 bp, Homo sapiens
cacccctgctgcgcgga

SEQ ID NO: 96 - DNA, 17 bp, Homo sapiens
acccctgctgcgcggag

SEQ ID NO: 97 - DNA, 17 bp, Homo sapiens
cccctgctgcgcggagg

SEQ ID NO: 98 - DNA, 17 bp, Homo sapiens
ccctgctgcgcggagga

SEQ ID NO: 99 - DNA, 17 bp, Homo sapiens
cctgctgcgcggaggag

SEQ ID NO: 100 - DNA, 17 bp, Homo sapiens
ctgctgcgcggaggagg

SEQ ID NO: 101 - DNA, 17 bp, Homo sapiens
tgctgcgcggaggaggg

SEQ ID NO: 102 - DNA, 17 bp, Homo sapiens
gctgcgcggaggagggg

SEQ ID NO: 103 - DNA, 17 bp, Homo sapiens
ctgcgcggaggaggggg

SEQ ID NO: 104 - DNA, 17 bp, Homo sapiens
tgcgcggaggagggggc

SEQ ID NO: 105 - DNA, 17 bp, Homo sapiens
gcgcggaggagggggct

SEQ ID NO: 106 - DNA, 17 bp, Homo sapiens
cgcggaggagggggctg

SEQ ID NO: 107 - DNA, 17 bp, Homo sapiens
gcggaggagggggctga

SEQ ID NO: 108 - DNA, 17 bp, Homo sapiens
cggaggagggggctgag

SEQ ID NO: 109 - DNA, 17 bp, Homo sapiens
ggaggagggggctgagc

SEQ ID NO: 110 - DNA, 17 bp, Homo sapiens
gaggagggggctgagct

SEQ ID NO: 111 - DNA, 17 bp, Homo sapiens
aggagggggctgagctg

SEQ ID NO: 112 - DNA, 17 bp, Homo sapiens
ggagggggctgagctga

SEQ ID NO: 113 - DNA, 17 bp, Homo sapiens
gagggggctgagctgaa

SEQ ID NO: 114 - DNA, 17 bp, Homo sapiens
agggggctgagctgaac

SEQ ID NO: 115 - DNA, 17 bp, Homo sapiens
gggggctgagctgaact

SEQ ID NO: 116 - DNA, 17 bp, Homo sapiens
ggggctgagctgaactc

SEQ ID NO: 117 - DNA, 17 bp, Homo sapiens
gggctgagctgaactca

SEQ ID NO: 118 - DNA, 17 bp, Homo sapiens
ggctgagctgaactcag

SEQ ID NO: 119 - DNA, 17 bp, Homo sapiens
gctgagctgaactcagc

SEQ ID NO: 120 - DNA, 17 bp, Homo sapiens
ctgagctgaactcagca

SEQ ID NO: 121 - DNA, 17 bp, Homo sapiens
tgagctgaactcagcag

SEQ ID NO: 122 - DNA, 17 bp, Homo sapiens
gagctgaactcagcaga

SEQ ID NO: 123 - DNA, 17 bp, Homo sapiens
agctgaactcagcagaa

SEQ ID NO: 124 - DNA, 17 bp, Homo sapiens
gctgaactcagcagaag

SEQ ID NO: 125 - DNA, 17 bp, Homo sapiens
ctgaactcagcagaagt

SEQ ID NO: 126 - DNA, 17 bp, Homo sapiens
tgaactcagcagaagtt

SEQ ID NO: 127 - DNA, 17 bp, Homo sapiens
gaactcagcagaagtta

SEQ ID NO: 128 - DNA, 17 bp, Homo sapiens
aactcagcagaagttac

SEQ ID NO: 129 - DNA, 17 bp, Homo sapiens
actcagcagaagttaca

SEQ ID NO: 130 - DNA, 17 bp, Homo sapiens
ctcagcagaagttacat

SEQ ID NO: 131 - DNA, 17 bp, Homo sapiens
tcagcagaagttacatg

SEQ ID NO: 132 - DNA, 17 bp, Homo sapiens
cagcagaagttacatgc

SEQ ID NO: 133 - DNA, 17 bp, Homo sapiens
agcagaagttacatgca

SEQ ID NO: 134 - DNA, 17 bp, Homo sapiens
gcagaagttacatgcac

SEQ ID NO: 135 - DNA, 17 bp, Homo sapiens
cagaagttacatgcaca

SEQ ID NO: 136 - DNA, 17 bp, Homo sapiens
agaagttacatgcacaa

SEQ ID NO: 137 - DNA, 17 bp, Homo sapiens
gaagttacatgcacaag

SEQ ID NO: 138 - DNA, 17 bp, Homo sapiens
aagttacatgcacaagg

SEQ ID NO: 139 - DNA, 17 bp, Homo sapiens
agttacatgcacaaggc

SEQ ID NO: 140 - DNA, 17 bp, Homo sapiens
gttacatgcacaaggca

SEQ ID NO: 141 - DNA, 17 bp, Homo sapiens
ttacatgcacaaggcaa

SEQ ID NO: 142 - DNA, 17 bp, Homo sapiens
tacatgcacaaggcaaa

SEQ ID NO: 143 - DNA, 17 bp, Homo sapiens
acatgcacaaggcaaaa

SEQ ID NO: 144 - DNA, 17 bp, Homo sapiens
catgcacaaggcaaaaa

SEQ ID NO: 145 - DNA, 17 bp, Homo sapiens
atgcacaaggcaaaaat

SEQ ID NO: 146 - DNA, 17 bp, Homo sapiens
tgcacaaggcaaaaatt

SEQ ID NO: 147 - DNA, 17 bp, Homo sapiens
gcacaaggcaaaaattc

SEQ ID NO: 148 - DNA, 17 bp, Homo sapiens
cacaaggcaaaaattct

SEQ ID NO: 149 - DNA, 17 bp, Homo sapiens
acaaggcaaaaattctg

SEQ ID NO: 150 - DNA, 17 bp, Homo sapiens
caaggcaaaaattctga

SEQ ID NO: 151 - DNA, 17 bp, Homo sapiens
aaggcaaaaattctgac

SEQ ID NO: 152 - DNA, 17 bp, Homo sapiens
aggcaaaaattctgacg

SEQ ID NO: 153 - DNA, 17 bp, Homo sapiens
ggcaaaaattctgacgt

SEQ ID NO: 154 - DNA, 17 bp, Homo sapiens
gcaaaaattctgacgtt

SEQ ID NO: 155 - DNA, 17 bp, Homo sapiens
caaaaattctgacgttc

SEQ ID NO: 156 - DNA, 17 bp, Homo sapiens
aaaaattctgacgttct

SEQ ID NO: 157 - DNA, 17 bp, Homo sapiens
aaaattctgacgttctc

SEQ ID NO: 158 - DNA, 17 bp, Homo sapiens
aaattctgacgttctca

SEQ ID NO: 159 - DNA, 17 bp, Homo sapiens
aattctgacgttctcaa

SEQ ID NO: 160 - DNA, 17 bp, Homo sapiens
attctgacgttctcaag

SEQ ID NO: 161 - DNA, 17 bp, Homo sapiens
ttctgacgttctcaaga

SEQ ID NO: 162 - DNA, 17 bp, Homo sapiens
tctgacgttctcaagag

SEQ ID NO: 163 - DNA, 17 bp, Homo sapiens
ctgacgttctcaagaga

SEQ ID NO: 164 - DNA, 17 bp, Homo sapiens
tgacgttctcaagagac

SEQ ID NO: 165 - DNA, 17 bp, Homo sapiens
gacgttctcaagagacc

SEQ ID NO: 166 - DNA, 17 bp, Homo sapiens
acgttctcaagagacca

SEQ ID NO: 167 - DNA, 17 bp, Homo sapiens
cgttctcaagagaccag

SEQ ID NO: 168 - DNA, 17 bp, Homo sapiens
gttctcaagagaccagc

SEQ ID NO: 169 - DNA, 17 bp, Homo sapiens
ttctcaagagaccagct

SEQ ID NO: 170 - DNA, 17 bp, Homo sapiens
tctcaagagaccagctc

SEQ ID NO: 171 - DNA, 17 bp, Homo sapiens
ctcaagagaccagctct

SEQ ID NO: 172 - DNA, 17 bp, Homo sapiens
tcaagagaccagctctg

SEQ ID NO: 173 - DNA, 17 bp, Homo sapiens
caagagaccagctctgc

SEQ ID NO: 174 - DNA, 17 bp, Homo sapiens
aagagaccagctctgcc

SEQ ID NO: 175 - DNA, 17 bp, Homo sapiens
agagaccagctctgccc

SEQ ID NO: 176 - DNA, 17 bp, Homo sapiens
gagaccagctctgcccc

SEQ ID NO: 177 - DNA, 17 bp, Homo sapiens
agaccagctctgccccc

SEQ ID NO: 178 - DNA, 17 bp, Homo sapiens
gaccagctctgcccccg

SEQ ID NO: 179 - DNA, 17 bp, Homo sapiens
accagctctgcccccgt

SEQ ID NO: 180 - DNA, 17 bp, Homo sapiens
ccagctctgcccccgtg

SEQ ID NO: 181 - DNA, 17 bp, Homo sapiens
cagctctgcccccgtgg

SEQ ID NO: 182 - DNA, 17 bp, Homo sapiens
agctctgcccccgtggc

SEQ ID NO: 183 - DNA, 17 bp, Homo sapiens
gctctgcccccgtggct

SEQ ID NO: 184 - DNA, 17 bp, Homo sapiens
ctctgcccccgtggctc

SEQ ID NO: 185 - DNA, 17 bp, Homo sapiens
tctgcccccgtggctca

SEQ ID NO: 186 - DNA, 17 bp, Homo sapiens
ctgcccccgtggctcaa

SEQ ID NO: 187 - DNA, 17 bp, Homo sapiens
tgcccccgtggctcaac

SEQ ID NO: 188 - DNA, 17 bp, Homo sapiens
gcccccgtggctcaact

SEQ ID NO: 189 - DNA, 17 bp, Homo sapiens
cccccgtggctcaactg

SEQ ID NO: 190 - DNA, 17 bp, Homo sapiens
ccccgtggctcaactga

SEQ ID NO: 191 - DNA, 17 bp, Homo sapiens
cccgtggctcaactgac

SEQ ID NO: 192 - DNA, 17 bp, Homo sapiens
ccgtggctcaactgacc

SEQ ID NO: 193 - DNA, 17 bp, Homo sapiens
cgtggctcaactgaccc

SEQ ID NO: 194 - DNA, 17 bp, Homo sapiens
gtggctcaactgaccct

SEQ ID NO: 195 - DNA, 17 bp, Homo sapiens
tggctcaactgacccta

SEQ ID NO: 196 - DNA, 17 bp, Homo sapiens
ggctcaactgaccctac

SEQ ID NO: 197 - DNA, 17 bp, Homo sapiens
gctcaactgaccctacc

SEQ ID NO: 198 - DNA, 17 bp, Homo sapiens
ctcaactgaccctacca

SEQ ID NO: 199 - DNA, 17 bp, Homo sapiens
tcaactgaccctaccat

SEQ ID NO: 200 - DNA, 17 bp, Homo sapiens
caactgaccctaccatg

SEQ ID NO: 201 - DNA, 17 bp, Homo sapiens
aactgaccctaccatgt

SEQ ID NO: 202 - DNA, 17 bp, Homo sapiens
actgaccctaccatgtg

SEQ ID NO: 203 - DNA, 17 bp, Homo sapiens
ctgaccctaccatgtgg

SEQ ID NO: 204 - DNA, 17 bp, Homo sapiens
tgaccctaccatgtgga

SEQ ID NO: 205 - DNA, 17 bp, Homo sapiens
gaccctaccatgtggac

SEQ ID NO: 206 - DNA, 17 bp, Homo sapiens
accctaccatgtggacg

SEQ ID NO: 207 - DNA, 17 bp, Homo sapiens
ccctaccatgtggacgc

SEQ ID NO: 208 - DNA, 17 bp, Homo sapiens
cctaccatgtggacgct

SEQ ID NO: 209 - DNA, 17 bp, Homo sapiens
ctaccatgtggacgctg

SEQ ID NO: 210 - DNA, 17 bp, Homo sapiens
taccatgtggacgctgc

SEQ ID NO: 211 - DNA, 17 bp, Homo sapiens
accatgtggacgctgct

SEQ ID NO: 212 - DNA, 17 bp, Homo sapiens
ccatgtggacgctgctc

SEQ ID NO: 213 - DNA, 17 bp, Homo sapiens
catgtggacgctgctcc

SEQ ID NO: 214 - DNA, 17 bp, Homo sapiens
atgtggacgctgctcct

SEQ ID NO: 215 - DNA, 17 bp, Homo sapiens
tgtggacgctgctcctc

SEQ ID NO: 216 - DNA, 17 bp, Homo sapiens
gtggacgctgctcctcc

SEQ ID NO: 217 - DNA, 17 bp, Homo sapiens
tggacgctgctcctcca

SEQ ID NO: 218 - DNA, 17 bp, Homo sapiens
ggacgctgctcctccag

SEQ ID NO: 219 - DNA, 17 bp, Homo sapiens
gacgctgctcctccagg

SEQ ID NO: 220 - DNA, 17 bp, Homo sapiens
acgctgctcctccaggt

SEQ ID NO: 221 - DNA, 17 bp, Homo sapiens
cgctgctcctccaggtg

SEQ ID NO: 222 - DNA, 17 bp, Homo sapiens
gctgctcctccaggtgg

SEQ ID NO: 223 - DNA, 17 bp, Homo sapiens
ctgctcctccaggtggg

SEQ ID NO: 224 - DNA, 17 bp, Homo sapiens
tgctcctccaggtggga

SEQ ID NO: 225 - DNA, 17 bp, Homo sapiens
gctcctccaggtgggaa

SEQ ID NO: 226 - DNA, 17 bp, Homo sapiens
ctcctccaggtgggaac

SEQ ID NO: 227 - DNA, 17 bp, Homo sapiens
tcctccaggtgggaact

SEQ ID NO: 228 - DNA, 17 bp, Homo sapiens
cctccaggtgggaactg

SEQ ID NO: 229 - DNA, 17 bp, Homo sapiens
ctccaggtgggaactgg

SEQ ID NO: 230 - DNA, 17 bp, Homo sapiens
tccaggtgggaactgga

SEQ ID NO: 231 - DNA, 17 bp, Homo sapiens
ccaggtgggaactggag

SEQ ID NO: 232 - DNA, 17 bp, Homo sapiens
caggtgggaactggagt

SEQ ID NO: 233 - DNA, 17 bp, Homo sapiens
aggtgggaactggagtt

SEQ ID NO: 234 - DNA, 17 bp, Homo sapiens
ggtgggaactggagttt

SEQ ID NO: 235 - DNA, 17 bp, Homo sapiens
gtgggaactggagtttt

SEQ ID NO: 236 - DNA, 17 bp, Homo sapiens
tgggaactggagttttg

SEQ ID NO: 237 - DNA, 17 bp, Homo sapiens
gggaactggagttttga

SEQ ID NO: 238 - DNA, 17 bp, Homo sapiens
ggaactggagttttgaa

SEQ ID NO: 239 - DNA, 17 bp, Homo sapiens
gaactggagttttgaaa

SEQ ID NO: 240 - DNA, 17 bp, Homo sapiens
aactggagttttgaaat

SEQ ID NO: 241 - DNA, 17 bp, Homo sapiens
actggagttttgaaata

SEQ ID NO: 242 - DNA, 17 bp, Homo sapiens
ctggagttttgaaataa

SEQ ID NO: 243 - DNA, 17 bp, Homo sapiens
tggagttttgaaataaa

SEQ ID NO: 244 - DNA, 17 bp, Homo sapiens
ggagttttgaaataaaa

SEQ ID NO: 245 - DNA, 17 bp, Homo sapiens
gagttttgaaataaaat

SEQ ID NO: 246 - DNA, 17 bp, Homo sapiens
agttttgaaataaaatg

SEQ ID NO: 247 - DNA, 17 bp, Homo sapiens
gttttgaaataaaatgg

SEQ ID NO: 248 - DNA, 17 bp, Homo sapiens
ttttgaaataaaatgga

SEQ ID NO: 249 - DNA, 17 bp, Homo sapiens
tttgaaataaaatggat

SEQ ID NO: 250 - DNA, 17 bp, Homo sapiens
ttgaaataaaatggatg

SEQ ID NO: 251 - DNA, 17 bp, Homo sapiens
tgaaataaaatggatga

SEQ ID NO: 252 - DNA, 17 bp, Homo sapiens
gaaataaaatggatgat

SEQ ID NO: 253 - DNA, 17 bp, Homo sapiens
aaataaaatggatgatt

SEQ ID NO: 254 - DNA, 17 bp, Homo sapiens
aataaaatggatgattt

SEQ ID NO: 255 - DNA, 17 bp, Homo sapiens
ataaaatggatgatttg

SEQ ID NO: 256 - DNA, 17 bp, Homo sapiens
taaaatggatgatttga

SEQ ID NO: 257 - DNA, 17 bp, Homo sapiens
aaaatggatgatttgac

SEQ ID NO: 258 - DNA, 17 bp, Homo sapiens
aaatggatgatttgacg

SEQ ID NO: 259 - DNA, 17 bp, Homo sapiens
aatggatgatttgacgt

SEQ ID NO: 260 - DNA, 17 bp, Homo sapiens
atggatgatttgacgtt

SEQ ID NO: 261 - DNA, 17 bp, Homo sapiens
tggatgatttgacgtta

SEQ ID NO: 262 - DNA, 17 bp, Homo sapiens
ggatgatttgacgttac

SEQ ID NO: 263 - DNA, 17 bp, Homo sapiens
gatgatttgacgttact

SEQ ID NO: 264 - DNA, 17 bp, Homo sapiens
atgatttgacgttactt

SEQ ID NO: 265 - DNA, 17 bp, Homo sapiens
tgatttgacgttacttg

SEQ ID NO: 266 - DNA, 17 bp, Homo sapiens
gatttgacgttacttga

SEQ ID NO: 267 - DNA, 17 bp, Homo sapiens
atttgacgttacttgat

SEQ ID NO: 268 - DNA, 17 bp, Homo sapiens
tttgacgttacttgatc

SEQ ID NO: 269 - DNA, 17 bp, Homo sapiens
ttgacgttacttgatct

SEQ ID NO: 270 - DNA, 17 bp, Homo sapiens
tgacgttacttgatctt

SEQ ID NO: 271 - DNA, 17 bp, Homo sapiens
gacgttacttgatcttc

SEQ ID NO: 272 - DNA, 17 bp, Homo sapiens
acgttacttgatcttct

SEQ ID NO: 273 - DNA, 17 bp, Homo sapiens
cgttacttgatcttctg

SEQ ID NO: 274 - DNA, 17 bp, Homo sapiens
gttacttgatcttctgg

SEQ ID NO: 275 - DNA, 17 bp, Homo sapiens
ttacttgatcttctgga

SEQ ID NO: 276 - DNA, 17 bp, Homo sapiens
tacttgatcttctggag

SEQ ID NO: 277 - DNA, 17 bp, Homo sapiens
acttgatcttctggagt

SEQ ID NO: 278 - DNA, 17 bp, Homo sapiens
cttgatcttctggagtg

SEQ ID NO: 279 - DNA, 17 bp, Homo sapiens
ttgatcttctggagtgc

SEQ ID NO: 280 - DNA, 17 bp, Homo sapiens
tgatcttctggagtgcc

SEQ ID NO: 281 - DNA, 17 bp, Homo sapiens
gatcttctggagtgccc

SEQ ID NO: 282 - DNA, 17 bp, Homo sapiens
atcttctggagtgccct

SEQ ID NO: 283 - DNA, 17 bp, Homo sapiens
tcttctggagtgccctg

SEQ ID NO: 284 - DNA, 17 bp, Homo sapiens
cttctggagtgccctgt

SEQ ID NO: 285 - DNA, 17 bp, Homo sapiens
ttctggagtgccctgtg

SEQ ID NO: 286 - DNA, 17 bp, Homo sapiens
tctggagtgccctgtgt

SEQ ID NO: 287 - DNA, 17 bp, Homo sapiens
ctggagtgccctgtgtg

SEQ ID NO: 288 - DNA, 17 bp, Homo sapiens
tggagtgccctgtgtgc

SEQ ID NO: 289 - DNA, 17 bp, Homo sapiens
ggagtgccctgtgtgct

SEQ ID NO: 290 - DNA, 17 bp, Homo sapiens
gagtgccctgtgtgctt

SEQ ID NO: 291 - DNA, 17 bp, Homo sapiens
agtgccctgtgtgcttt

SEQ ID NO: 292 - DNA, 17 bp, Homo sapiens
gtgccctgtgtgctttg

SEQ ID NO: 293 - DNA, 17 bp, Homo sapiens
tgccctgtgtgctttga

SEQ ID NO: 294 - DNA, 17 bp, Homo sapiens
gccctgtgtgctttgag

SEQ ID NO: 295 - DNA, 17 bp, Homo sapiens
ccctgtgtgctttgaga

SEQ ID NO: 296 - DNA, 17 bp, Homo sapiens
cctgtgtgctttgagaa

SEQ ID NO: 297 - DNA, 17 bp, Homo sapiens
ctgtgtgctttgagaag

SEQ ID NO: 298 - DNA, 17 bp, Homo sapiens
tgtgtgctttgagaagc

SEQ ID NO: 299 - DNA, 17 bp, Homo sapiens
gtgtgctttgagaagct

SEQ ID NO: 300 - DNA, 17 bp, Homo sapiens
tgtgctttgagaagctc

SEQ ID NO: 301 - DNA, 17 bp, Homo sapiens
gtgctttgagaagctcg

SEQ ID NO: 302 - DNA, 17 bp, Homo sapiens
tgctttgagaagctcga

SEQ ID NO: 303 - DNA, 17 bp, Homo sapiens
gctttgagaagctcgat

SEQ ID NO: 304 - DNA, 17 bp, Homo sapiens
ctttgagaagctcgatg

SEQ ID NO: 305 - DNA, 17 bp, Homo sapiens
tttgagaagctcgatgt

SEQ ID NO: 306 - DNA, 17 bp, Homo sapiens
ttgagaagctcgatgtc

SEQ ID NO: 307 - DNA, 17 bp, Homo sapiens
tgagaagctcgatgtca

SEQ ID NO: 308 - DNA, 17 bp, Homo sapiens
gagaagctcgatgtcac

SEQ ID NO: 309 - DNA, 17 bp, Homo sapiens
agaagctcgatgtcaca

SEQ ID NO: 310 - DNA, 17 bp, Homo sapiens
gaagctcgatgtcacag

SEQ ID NO: 311 - DNA, 17 bp, Homo sapiens
aagctcgatgtcacagc

SEQ ID NO: 312 - DNA, 17 bp, Homo sapiens
agctcgatgtcacagcc

SEQ ID NO: 313 - DNA, 17 bp, Homo sapiens
gctcgatgtcacagcca

SEQ ID NO: 314 - DNA, 17 bp, Homo sapiens
ctcgatgtcacagccaa

SEQ ID NO: 315 - DNA, 17 bp, Homo sapiens
tcgatgtcacagccaaa

SEQ ID NO: 316 - DNA, 17 bp, Homo sapiens
cgatgtcacagccaaag

SEQ ID NO: 317 - DNA, 17 bp, Homo sapiens
gatgtcacagccaaagt

SEQ ID NO: 318 - DNA, 17 bp, Homo sapiens
atgtcacagccaaagtc

SEQ ID NO: 319 - DNA, 17 bp, Homo sapiens
tgtcacagccaaagtcc

SEQ ID NO: 320 - DNA, 17 bp, Homo sapiens
gtcacagccaaagtcct

SEQ ID NO: 321 - DNA, 17 bp, Homo sapiens
tcacagccaaagtcctc

SEQ ID NO: 322 - DNA, 17 bp, Homo sapiens
cacagccaaagtcctcc

SEQ ID NO: 323 - DNA, 17 bp, Homo sapiens
acagccaaagtcctccc

SEQ ID NO: 324 - DNA, 17 bp, Homo sapiens
cagccaaagtcctccct

SEQ ID NO: 325 - DNA, 17 bp, Homo sapiens
agccaaagtcctccctt

SEQ ID NO: 326 - DNA, 17 bp, Homo sapiens
gccaaagtcctcccttg

SEQ ID NO: 327 - DNA, 17 bp, Homo sapiens
ccaaagtcctcccttgc

SEQ ID NO: 328 - DNA, 17 bp, Homo sapiens
caaagtcctcccttgcc

SEQ ID NO: 329 - DNA, 17 bp, Homo sapiens
aaagtcctcccttgcca

SEQ ID NO: 330 - DNA, 17 bp, Homo sapiens
aagtcctcccttgccag

SEQ ID NO: 331 - DNA, 17 bp, Homo sapiens
agtcctcccttgccagc

SEQ ID NO: 332 - DNA, 17 bp, Homo sapiens
gtcctcccttgccagca

SEQ ID NO: 333 - DNA, 17 bp, Homo sapiens
tcctcccttgccagcac

SEQ ID NO: 334 - DNA, 17 bp, Homo sapiens
cctcccttgccagcaca

SEQ ID NO: 335 - DNA, 17 bp, Homo sapiens
ctcccttgccagcacac

SEQ ID NO: 336 - DNA, 17 bp, Homo sapiens
tcccttgccagcacacc

SEQ ID NO: 337 - DNA, 17 bp, Homo sapiens
cccttgccagcacacct

SEQ ID NO: 338 - DNA, 17 bp, Homo sapiens
ccttgccagcacacctt

SEQ ID NO: 339 - DNA, 17 bp, Homo sapiens
cttgccagcacaccttc

SEQ ID NO: 340 - DNA, 17 bp, Homo sapiens
ttgccagcacaccttct

SEQ ID NO: 341 - DNA, 17 bp, Homo sapiens
tgccagcacaccttctg

SEQ ID NO: 342 - DNA, 17 bp, Homo sapiens
gccagcacaccttctgc

SEQ ID NO: 343 - DNA, 17 bp, Homo sapiens
ccagcacaccttctgca

SEQ ID NO: 344 - DNA, 17 bp, Homo sapiens
cagcacaccttctgcaa

SEQ ID NO: 345 - DNA, 17 bp, Homo sapiens
agcacaccttctgcaaa

SEQ ID NO: 346 - DNA, 17 bp, Homo sapiens
gcacaccttctgcaaac

SEQ ID NO: 347 - DNA, 17 bp, Homo sapiens
cacaccttctgcaaacc

SEQ ID NO: 348 - DNA, 17 bp, Homo sapiens
acaccttctgcaaacca

SEQ ID NO: 349 - DNA, 17 bp, Homo sapiens
caccttctgcaaaccat

SEQ ID NO: 350 - DNA, 17 bp, Homo sapiens
accttctgcaaaccatg

SEQ ID NO: 351 - DNA, 17 bp, Homo sapiens
ccttctgcaaaccatgt

SEQ ID NO: 352 - DNA, 17 bp, Homo sapiens
cttctgcaaaccatgtc

SEQ ID NO: 353 - DNA, 17 bp, Homo sapiens
ttctgcaaaccatgtct

SEQ ID NO: 354 - DNA, 17 bp, Homo sapiens
tctgcaaaccatgtcta

SEQ ID NO: 355 - DNA, 17 bp, Homo sapiens
ctgcaaaccatgtctac

SEQ ID NO: 356 - DNA, 17 bp, Homo sapiens
tgcaaaccatgtctaca

SEQ ID NO: 357 - DNA, 17 bp, Homo sapiens
gcaaaccatgtctacag

SEQ ID NO: 358 - DNA, 17 bp, Homo sapiens
caaaccatgtctacaga

SEQ ID NO: 359 - DNA, 17 bp, Homo sapiens
aaaccatgtctacagag

SEQ ID NO: 360 - DNA, 17 bp, Homo sapiens
aaccatgtctacagagg

SEQ ID NO: 361 - DNA, 17 bp, Homo sapiens
accatgtctacagaggg

SEQ ID NO: 362 - DNA, 17 bp, Homo sapiens
ccatgtctacagagggt

SEQ ID NO: 363 - DNA, 17 bp, Homo sapiens
catgtctacagagggtt

SEQ ID NO: 364 - DNA, 17 bp, Homo sapiens
atgtctacagagggttt

SEQ ID NO: 365 - DNA, 17 bp, Homo sapiens
tgtctacagagggtttt

SEQ ID NO: 366 - DNA, 17 bp, Homo sapiens
gtctacagagggttttc

SEQ ID NO: 367 - DNA, 17 bp, Homo sapiens
tctacagagggttttca

SEQ ID NO: 368 - DNA, 17 bp, Homo sapiens
ctacagagggttttcaa

SEQ ID NO: 369 - DNA, 17 bp, Homo sapiens
tacagagggttttcaag

SEQ ID NO: 370 - DNA, 17 bp, Homo sapiens
acagagggttttcaagg

SEQ ID NO: 371 - DNA, 17 bp, Homo sapiens
cagagggttttcaaggc

SEQ ID NO: 372 - DNA, 17 bp, Homo sapiens
agagggttttcaaggcc

SEQ ID NO: 373 - DNA, 17 bp, Homo sapiens
gagggttttcaaggccc

SEQ ID NO: 374 - DNA, 17 bp, Homo sapiens
agggttttcaaggccca

SEQ ID NO: 375 - DNA, 17 bp, Homo sapiens
gggttttcaaggcccac

SEQ ID NO: 376 - DNA, 17 bp, Homo sapiens
ggttttcaaggcccaca

SEQ ID NO: 377 - DNA, 17 bp, Homo sapiens
gttttcaaggcccacaa

SEQ ID NO: 378 - DNA, 17 bp, Homo sapiens
ttttcaaggcccacaaa

SEQ ID NO: 379 - DNA, 17 bp, Homo sapiens
tttcaaggcccacaaag

SEQ ID NO: 380 - DNA, 17 bp, Homo sapiens
ttcaaggcccacaaaga

SEQ ID NO: 381 - DNA, 17 bp, Homo sapiens
tcaaggcccacaaagag

SEQ ID NO: 382 - DNA, 17 bp, Homo sapiens
caaggcccacaaagagc

SEQ ID NO: 383 - DNA, 17 bp, Homo sapiens
aaggcccacaaagagct

SEQ ID NO: 384 - DNA, 17 bp, Homo sapiens
aggcccacaaagagctg

SEQ ID NO: 385 - DNA, 17 bp, Homo sapiens
ggcccacaaagagctgc

SEQ ID NO: 386 - DNA, 17 bp, Homo sapiens
gcccacaaagagctgcg

SEQ ID NO: 387 - DNA, 17 bp, Homo sapiens
cccacaaagagctgcgg

SEQ ID NO: 388 - DNA, 17 bp, Homo sapiens
ccacaaagagctgcggt

SEQ ID NO: 389 - DNA, 17 bp, Homo sapiens
cacaaagagctgcggtg

SEQ ID NO: 390 - DNA, 17 bp, Homo sapiens
acaaagagctgcggtgc

SEQ ID NO: 391 - DNA, 17 bp, Homo sapiens
caaagagctgcggtgcc

SEQ ID NO: 392 - DNA, 17 bp, Homo sapiens
aaagagctgcggtgccc

SEQ ID NO: 393 - DNA, 17 bp, Homo sapiens
aagagctgcggtgcccc

SEQ ID NO: 394 - DNA, 17 bp, Homo sapiens
agagctgcggtgccccg

SEQ ID NO: 395 - DNA, 17 bp, Homo sapiens
gagctgcggtgccccga

SEQ ID NO: 396 - DNA, 17 bp, Homo sapiens
agctgcggtgccccgaa

SEQ ID NO: 397 - DNA, 17 bp, Homo sapiens
gctgcggtgccccgaat

SEQ ID NO: 398 - DNA, 17 bp, Homo sapiens
ctgcggtgccccgaatg

SEQ ID NO: 399 - DNA, 17 bp, Homo sapiens
tgcggtgccccgaatgc

SEQ ID NO: 400 - DNA, 17 bp, Homo sapiens
gcggtgccccgaatgca

SEQ ID NO: 401 - DNA, 17 bp, Homo sapiens
cggtgccccgaatgcag

SEQ ID NO: 402 - DNA, 17 bp, Homo sapiens
ggtgccccgaatgcagg

SEQ ID NO: 403 - DNA, 17 bp, Homo sapiens
gtgccccgaatgcagga

SEQ ID NO: 404 - DNA, 17 bp, Homo sapiens
tgccccgaatgcaggac

SEQ ID NO: 405 - DNA, 17 bp, Homo sapiens
gccccgaatgcaggacg

SEQ ID NO: 406 - DNA, 17 bp, Homo sapiens
ccccgaatgcaggacgc

SEQ ID NO: 407 - DNA, 17 bp, Homo sapiens
cccgaatgcaggacgcc

SEQ ID NO: 408 - DNA, 17 bp, Homo sapiens
ccgaatgcaggacgcct

SEQ ID NO: 409 - DNA, 17 bp, Homo sapiens
cgaatgcaggacgcctg

SEQ ID NO: 410 - DNA, 17 bp, Homo sapiens
gaatgcaggacgcctgt

SEQ ID NO: 411 - DNA, 17 bp, Homo sapiens
aatgcaggacgcctgtg

SEQ ID NO: 412 - DNA, 17 bp, Homo sapiens
atgcaggacgcctgtgt

SEQ ID NO: 413 - DNA, 17 bp, Homo sapiens
tgcaggacgcctgtgtt

SEQ ID NO: 414 - DNA, 17 bp, Homo sapiens
gcaggacgcctgtgttt

SEQ ID NO: 415 - DNA, 17 bp, Homo sapiens
caggacgcctgtgtttt

SEQ ID NO: 416 - DNA, 17 bp, Homo sapiens
aggacgcctgtgttttc

SEQ ID NO: 417 - DNA, 17 bp, Homo sapiens
ggacgcctgtgttttcc

SEQ ID NO: 418 - DNA, 17 bp, Homo sapiens
gacgcctgtgttttcca

SEQ ID NO: 419 - DNA, 17 bp, Homo sapiens
acgcctgtgttttccaa

SEQ ID NO: 420 - DNA, 17 bp, Homo sapiens
cgcctgtgttttccaac

SEQ ID NO: 421 - DNA, 17 bp, Homo sapiens
gcctgtgttttccaaca

SEQ ID NO: 422 - DNA, 17 bp, Homo sapiens
cctgtgttttccaacat

SEQ ID NO: 423 - DNA, 17 bp, Homo sapiens
ctgtgttttccaacatt

SEQ ID NO: 424 - DNA, 17 bp, Homo sapiens
tgtgttttccaacattg

SEQ ID NO: 425 - DNA, 17 bp, Homo sapiens
gtgttttccaacattga

SEQ ID NO: 426 - DNA, 17 bp, Homo sapiens
tgttttccaacattgag

SEQ ID NO: 427 - DNA, 17 bp, Homo sapiens
gttttccaacattgagg

SEQ ID NO: 428 - DNA, 17 bp, Homo sapiens
ttttccaacattgaggc

SEQ ID NO: 429 - DNA, 17 bp, Homo sapiens
tttccaacattgaggcg

SEQ ID NO: 430 - DNA, 17 bp, Homo sapiens
ttccaacattgaggcgc

SEQ ID NO: 431 - DNA, 17 bp, Homo sapiens
tccaacattgaggcgct

SEQ ID NO: 432 - DNA, 17 bp, Homo sapiens
ccaacattgaggcgctg

SEQ ID NO: 433 - DNA, 17 bp, Homo sapiens
caacattgaggcgctgc

SEQ ID NO: 434 - DNA, 17 bp, Homo sapiens
aacattgaggcgctgcc

SEQ ID NO: 435 - DNA, 17 bp, Homo sapiens
acattgaggcgctgccg

SEQ ID NO: 436 - DNA, 17 bp, Homo sapiens
cattgaggcgctgccgg

SEQ ID NO: 437 - DNA, 17 bp, Homo sapiens
attgaggcgctgccggc

SEQ ID NO: 438 - DNA, 17 bp, Homo sapiens
ttgaggcgctgccggcc

SEQ ID NO: 439 - DNA, 17 bp, Homo sapiens
tgaggcgctgccggcca

SEQ ID NO: 440 - DNA, 17 bp, Homo sapiens
gaggcgctgccggccaa

SEQ ID NO: 441 - DNA, 17 bp, Homo sapiens
aggcgctgccggccaac

SEQ ID NO: 442 - DNA, 17 bp, Homo sapiens
ggcgctgccggccaacc

SEQ ID NO: 443 - DNA, 17 bp, Homo sapiens
gcgctgccggccaacct

SEQ ID NO: 444 - DNA, 17 bp, Homo sapiens
cgctgccggccaacctg

SEQ ID NO: 445 - DNA, 17 bp, Homo sapiens
gctgccggccaacctgc

SEQ ID NO: 446 - DNA, 17 bp, Homo sapiens
ctgccggccaacctgct

SEQ ID NO: 447 - DNA, 17 bp, Homo sapiens
tgccggccaacctgctg

SEQ ID NO: 448 - DNA, 17 bp, Homo sapiens
gccggccaacctgctgc

SEQ ID NO: 449 - DNA, 17 bp, Homo sapiens
ccggccaacctgctgct

SEQ ID NO: 450 - DNA, 17 bp, Homo sapiens
cggccaacctgctgctc

SEQ ID NO: 451 - DNA, 17 bp, Homo sapiens
ggccaacctgctgctcg

SEQ ID NO: 452 - DNA, 17 bp, Homo sapiens
gccaacctgctgctcgt

SEQ ID NO: 453 - DNA, 17 bp, Homo sapiens
ccaacctgctgctcgtg

SEQ ID NO: 454 - DNA, 17 bp, Homo sapiens
caacctgctgctcgtgc

SEQ ID NO: 455 - DNA, 17 bp, Homo sapiens
aacctgctgctcgtgcg

SEQ ID NO: 456 - DNA, 17 bp, Homo sapiens
acctgctgctcgtgcgc

SEQ ID NO: 457 - DNA, 17 bp, Homo sapiens
cctgctgctcgtgcgcc

SEQ ID NO: 458 - DNA, 17 bp, Homo sapiens
ctgctgctcgtgcgcct

SEQ ID NO: 459 - DNA, 17 bp, Homo sapiens
tgctgctcgtgcgcctt

SEQ ID NO: 460 - DNA, 17 bp, Homo sapiens
gctgctcgtgcgccttc

SEQ ID NO: 461 - DNA, 17 bp, Homo sapiens
ctgctcgtgcgccttct

SEQ ID NO: 462 - DNA, 17 bp, Homo sapiens
tgctcgtgcgccttctg

SEQ ID NO: 463 - DNA, 17 bp, Homo sapiens
gctcgtgcgccttctgg

SEQ ID NO: 464 - DNA, 17 bp, Homo sapiens
ctcgtgcgccttctgga

SEQ ID NO: 465 - DNA, 17 bp, Homo sapiens
tcgtgcgccttctggat

SEQ ID NO: 466 - DNA, 17 bp, Homo sapiens
cgtgcgccttctggatg

SEQ ID NO: 467 - DNA, 17 bp, Homo sapiens
gtgcgccttctggatgg

SEQ ID NO: 468 - DNA, 17 bp, Homo sapiens
tgcgccttctggatgga

SEQ ID NO: 469 - DNA, 17 bp, Homo sapiens
gcgccttctggatggag

SEQ ID NO: 470 - DNA, 17 bp, Homo sapiens
cgccttctggatggagt

SEQ ID NO: 471 - DNA, 17 bp, Homo sapiens
gccttctggatggagtg

SEQ ID NO: 472 - DNA, 17 bp, Homo sapiens
ccttctggatggagtgc

SEQ ID NO: 473 - DNA, 17 bp, Homo sapiens
cttctggatggagtgcg

SEQ ID NO: 474 - DNA, 17 bp, Homo sapiens
ttctggatggagtgcgc

SEQ ID NO: 475 - DNA, 17 bp, Homo sapiens
tctggatggagtgcgct

SEQ ID NO: 476 - DNA, 17 bp, Homo sapiens
ctggatggagtgcgctc

SEQ ID NO: 477 - DNA, 17 bp, Homo sapiens
tggatggagtgcgctca

SEQ ID NO: 478 - DNA, 17 bp, Homo sapiens
ggatggagtgcgctcag

SEQ ID NO: 479 - DNA, 17 bp, Homo sapiens
gatggagtgcgctcagg

SEQ ID NO: 480 - DNA, 17 bp, Homo sapiens
atggagtgcgctcaggg

SEQ ID NO: 481 - DNA, 17 bp, Homo sapiens
tggagtgcgctcagggc

SEQ ID NO: 482 - DNA, 17 bp, Homo sapiens
ggagtgcgctcagggca

SEQ ID NO: 483 - DNA, 17 bp, Homo sapiens
gagtgcgctcagggcag

SEQ ID NO: 484 - DNA, 17 bp, Homo sapiens
agtgcgctcagggcaga

SEQ ID NO: 485 - DNA, 17 bp, Homo sapiens
gtgcgctcagggcagag

SEQ ID NO: 486 - DNA, 17 bp, Homo sapiens
tgcgctcagggcagagc

SEQ ID NO: 487 - DNA, 17 bp, Homo sapiens
gcgctcagggcagagct

SEQ ID NO: 488 - DNA, 17 bp, Homo sapiens
cgctcagggcagagctc

SEQ ID NO: 489 - DNA, 17 bp, Homo sapiens
gctcagggcagagctcc

SEQ ID NO: 490 - DNA, 17 bp, Homo sapiens
ctcagggcagagctccg

SEQ ID NO: 491 - DNA, 17 bp, Homo sapiens
tcagggcagagctccgg

SEQ ID NO: 492 - DNA, 17 bp, Homo sapiens
cagggcagagctccggg

SEQ ID NO: 493 - DNA, 17 bp, Homo sapiens
agggcagagctccggga

SEQ ID NO: 494 - DNA, 17 bp, Homo sapiens
gggcagagctccgggag

SEQ ID NO: 495 - DNA, 17 bp, Homo sapiens
ggcagagctccgggaga

SEQ ID NO: 496 - DNA, 17 bp, Homo sapiens
gcagagctccgggagag

SEQ ID NO: 497 - DNA, 17 bp, Homo sapiens
cagagctccgggagagg

SEQ ID NO: 498 - DNA, 17 bp, Homo sapiens
agagctccgggagaggg

SEQ ID NO: 499 - DNA, 17 bp, Homo sapiens
gagctccgggagagggg

SEQ ID NO: 500 - DNA, 17 bp, Homo sapiens
agctccgggagaggggg

SEQ ID NO: 501 - DNA, 17 bp, Homo sapiens
gctccgggagagggggc

SEQ ID NO: 502 - DNA, 17 bp, Homo sapiens
ctccgggagagggggct

SEQ ID NO: 503 - DNA, 17 bp, Homo sapiens
tccgggagagggggctc

SEQ ID NO: 504 - DNA, 17 bp, Homo sapiens
ccgggagagggggctcc

SEQ ID NO: 505 - DNA, 17 bp, Homo sapiens
cgggagagggggctcct

SEQ ID NO: 506 - DNA, 17 bp, Homo sapiens
gggagagggggctcctt

SEQ ID NO: 507 - DNA, 17 bp, Homo sapiens
ggagagggggctccttc

SEQ ID NO: 508 - DNA, 17 bp, Homo sapiens
gagagggggctccttcc

SEQ ID NO: 509 - DNA, 17 bp, Homo sapiens
agagggggctccttccg

SEQ ID NO: 510 - DNA, 17 bp, Homo sapiens
gagggggctccttccgc

SEQ ID NO: 511 - DNA, 17 bp, Homo sapiens
agggggctccttccgca

SEQ ID NO: 512 - DNA, 17 bp, Homo sapiens
gggggctccttccgcag

SEQ ID NO: 513 - DNA, 17 bp, Homo sapiens
ggggctccttccgcagg

SEQ ID NO: 514 - DNA, 17 bp, Homo sapiens
gggctccttccgcaggc

SEQ ID NO: 515 - DNA, 17 bp, Homo sapiens
ggctccttccgcaggcc

SEQ ID NO: 516 - DNA, 17 bp, Homo sapiens
gctccttccgcaggcct

SEQ ID NO: 517 - DNA, 17 bp, Homo sapiens
ctccttccgcaggcctg

SEQ ID NO: 518 - DNA, 17 bp, Homo sapiens
tccttccgcaggcctgg

SEQ ID NO: 519 - DNA, 17 bp, Homo sapiens
ccttccgcaggcctggc

SEQ ID NO: 520 - DNA, 17 bp, Homo sapiens
cttccgcaggcctggca

SEQ ID NO: 521 - DNA, 17 bp, Homo sapiens
ttccgcaggcctggcac

SEQ ID NO: 522 - DNA, 17 bp, Homo sapiens
tccgcaggcctggcacg

SEQ ID NO: 523 - DNA, 17 bp, Homo sapiens
ccgcaggcctggcacga

SEQ ID NO: 524 - DNA, 17 bp, Homo sapiens
cgcaggcctggcacgat

SEQ ID NO: 525 - DNA, 17 bp, Homo sapiens
gcaggcctggcacgatg

SEQ ID NO: 526 - DNA, 17 bp, Homo sapiens
caggcctggcacgatga

SEQ ID NO: 527 - DNA, 17 bp, Homo sapiens
aggcctggcacgatgac

SEQ ID NO: 528 - DNA, 17 bp, Homo sapiens
ggcctggcacgatgacc

SEQ ID NO: 529 - DNA, 17 bp, Homo sapiens
gcctggcacgatgacct

SEQ ID NO: 530 - DNA, 17 bp, Homo sapiens
cctggcacgatgacctt

SEQ ID NO: 531 - DNA, 17 bp, Homo sapiens
ctggcacgatgaccttg

SEQ ID NO: 532 - DNA, 17 bp, Homo sapiens
tggcacgatgaccttgc

SEQ ID NO: 533 - DNA, 17 bp, Homo sapiens
ggcacgatgaccttgca

SEQ ID NO: 534 - DNA, 17 bp, Homo sapiens
gcacgatgaccttgcag

SEQ ID NO: 535 - DNA, 17 bp, Homo sapiens
cacgatgaccttgcagg

SEQ ID NO: 536 - DNA, 17 bp, Homo sapiens
acgatgaccttgcagga

SEQ ID NO: 537 - DNA, 17 bp, Homo sapiens
cgatgaccttgcaggat

SEQ ID NO: 538 - DNA, 17 bp, Homo sapiens
gatgaccttgcaggatg

SEQ ID NO: 539 - DNA, 17 bp, Homo sapiens
atgaccttgcaggatgg

SEQ ID NO: 540 - DNA, 17 bp, Homo sapiens
tgaccttgcaggatggc

SEQ ID NO: 541 - DNA, 17 bp, Homo sapiens
gaccttgcaggatggca

SEQ ID NO: 542 - DNA, 17 bp, Homo sapiens
accttgcaggatggcag

SEQ ID NO: 543 - DNA, 17 bp, Homo sapiens
ccttgcaggatggcagg

SEQ ID NO: 544 - DNA, 17 bp, Homo sapiens
cttgcaggatggcagga

SEQ ID NO: 545 - DNA, 17 bp, Homo sapiens
ttgcaggatggcaggaa

SEQ ID NO: 546 - DNA, 17 bp, Homo sapiens
tgcaggatggcaggaaa

SEQ ID NO: 547 - DNA, 17 bp, Homo sapiens
gcaggatggcaggaaaa

SEQ ID NO: 548 - DNA, 17 bp, Homo sapiens
caggatggcaggaaaag

SEQ ID NO: 549 - DNA, 17 bp, Homo sapiens
aggatggcaggaaaagc

SEQ ID NO: 550 - DNA, 17 bp, Homo sapiens
ggatggcaggaaaagca

SEQ ID NO: 551 - DNA, 17 bp, Homo sapiens
gatggcaggaaaagcag

SEQ ID NO: 552 - DNA, 17 bp, Homo sapiens
atggcaggaaaagcagg

SEQ ID NO: 553 - DNA, 17 bp, Homo sapiens
tggcaggaaaagcagga

SEQ ID NO: 554 - DNA, 17 bp, Homo sapiens
ggcaggaaaagcaggac

SEQ ID NO: 555 - DNA, 17 bp, Homo sapiens
gcaggaaaagcaggacc

SEQ ID NO: 556 - DNA, 17 bp, Homo sapiens
caggaaaagcaggacca

SEQ ID NO: 557 - DNA, 17 bp, Homo sapiens
aggaaaagcaggaccaa

SEQ ID NO: 558 - DNA, 17 bp, Homo sapiens
ggaaaagcaggaccaac

SEQ ID NO: 559 - DNA, 17 bp, Homo sapiens
gaaaagcaggaccaacc

SEQ ID NO: 560 - DNA, 17 bp, Homo sapiens
aaaagcaggaccaaccc

SEQ ID NO: 561 - DNA, 17 bp, Homo sapiens
aaagcaggaccaacccc

SEQ ID NO: 562 - DNA, 17 bp, Homo sapiens
aagcaggaccaacccca

SEQ ID NO: 563 - DNA, 17 bp, Homo sapiens
agcaggaccaaccccag

SEQ ID NO: 564 - DNA, 17 bp, Homo sapiens
gcaggaccaaccccaga

SEQ ID NO: 565 - DNA, 17 bp, Homo sapiens
caggaccaaccccagac

SEQ ID NO: 566 - DNA, 17 bp, Homo sapiens
aggaccaaccccagacg

SEQ ID NO: 567 - DNA, 17 bp, Homo sapiens
ggaccaaccccagacgt

SEQ ID NO: 568 - DNA, 17 bp, Homo sapiens
gaccaaccccagacgtc

SEQ ID NO: 569 - DNA, 17 bp, Homo sapiens
accaaccccagacgtct

SEQ ID NO: 570 - DNA, 17 bp, Homo sapiens
ccaaccccagacgtctg

SEQ ID NO: 571 - DNA, 17 bp, Homo sapiens
caaccccagacgtctgc

SEQ ID NO: 572 - DNA, 17 bp, Homo sapiens
aaccccagacgtctgca

SEQ ID NO: 573 - DNA, 17 bp, Homo sapiens
accccagacgtctgcag

SEQ ID NO: 574 - DNA, 17 bp, Homo sapiens
ccccagacgtctgcagg

SEQ ID NO: 575 - DNA, 17 bp, Homo sapiens
cccagacgtctgcaggc

SEQ ID NO: 576 - DNA, 17 bp, Homo sapiens
ccagacgtctgcaggcc

SEQ ID NO: 577 - DNA, 17 bp, Homo sapiens
cagacgtctgcaggcca

SEQ ID NO: 578 - DNA, 17 bp, Homo sapiens
agacgtctgcaggccag

SEQ ID NO: 579 - DNA, 17 bp, Homo sapiens
gacgtctgcaggccagt

SEQ ID NO: 580 - DNA, 17 bp, Homo sapiens
acgtctgcaggccagtc

SEQ ID NO: 581 - DNA, 17 bp, Homo sapiens
cgtctgcaggccagtcc

SEQ ID NO: 582 - DNA, 17 bp, Homo sapiens
gtctgcaggccagtcct

SEQ ID NO: 583 - DNA, 17 bp, Homo sapiens
tctgcaggccagtcctt

SEQ ID NO: 584 - DNA, 17 bp, Homo sapiens
ctgcaggccagtccttt

SEQ ID NO: 585 - DNA, 17 bp, Homo sapiens
tgcaggccagtcctttc

SEQ ID NO: 586 - DNA, 17 bp, Homo sapiens
gcaggccagtcctttcc

SEQ ID NO: 587 - DNA, 17 bp, Homo sapiens
caggccagtcctttccg

SEQ ID NO: 588 - DNA, 17 bp, Homo sapiens
aggccagtcctttccgg

SEQ ID NO: 589 - DNA, 17 bp, Homo sapiens
ggccagtcctttccggc

SEQ ID NO: 590 - DNA, 17 bp, Homo sapiens
gccagtcctttccggct

SEQ ID NO: 591 - DNA, 17 bp, Homo sapiens
ccagtcctttccggcta

SEQ ID NO: 592 - DNA, 17 bp, Homo sapiens
cagtcctttccggctag

SEQ ID NO: 593 - DNA, 17 bp, Homo sapiens
agtcctttccggctagt

SEQ ID NO: 594 - DNA, 17 bp, Homo sapiens
gtcctttccggctagtg

SEQ ID NO: 595 - DNA, 17 bp, Homo sapiens
tcctttccggctagtgc

SEQ ID NO: 596 - DNA, 17 bp, Homo sapiens
cctttccggctagtgcc

SEQ ID NO: 597 - DNA, 17 bp, Homo sapiens
ctttccggctagtgcct

SEQ ID NO: 598 - DNA, 17 bp, Homo sapiens
tttccggctagtgccta

SEQ ID NO: 599 - DNA, 17 bp, Homo sapiens
ttccggctagtgcctaa

SEQ ID NO: 600 - DNA, 17 bp, Homo sapiens
tccggctagtgcctaat

SEQ ID NO: 601 - DNA, 17 bp, Homo sapiens
ccggctagtgcctaatg

SEQ ID NO: 602 - DNA, 17 bp, Homo sapiens
cggctagtgcctaatgt

SEQ ID NO: 603 - DNA, 17 bp, Homo sapiens
ggctagtgcctaatgtc

SEQ ID NO: 604 - DNA, 17 bp, Homo sapiens
gctagtgcctaatgtca

SEQ ID NO: 605 - DNA, 17 bp, Homo sapiens
ctagtgcctaatgtcag

SEQ ID NO: 606 - DNA, 17 bp, Homo sapiens
tagtgcctaatgtcaga

SEQ ID NO: 607 - DNA, 17 bp, Homo sapiens
agtgcctaatgtcagaa

SEQ ID NO: 608 - DNA, 17 bp, Homo sapiens
gtgcctaatgtcagaat

SEQ ID NO: 609 - DNA, 17 bp, Homo sapiens
tgcctaatgtcagaatc

SEQ ID NO: 610 - DNA, 17 bp, Homo sapiens
gcctaatgtcagaatcc

SEQ ID NO: 611 - DNA, 17 bp, Homo sapiens
cctaatgtcagaatcca

SEQ ID NO: 612 - DNA, 17 bp, Homo sapiens
ctaatgtcagaatccac

SEQ ID NO: 613 - DNA, 17 bp, Homo sapiens
taatgtcagaatccaca

SEQ ID NO: 614 - DNA, 17 bp, Homo sapiens
aatgtcagaatccacat

SEQ ID NO: 615 - DNA, 17 bp, Homo sapiens
atgtcagaatccacatg

SEQ ID NO: 616 - DNA, 17 bp, Homo sapiens
tgtcagaatccacatgg

SEQ ID NO: 617 - DNA, 17 bp, Homo sapiens
gtcagaatccacatgga

SEQ ID NO: 618 - DNA, 17 bp, Homo sapiens
tcagaatccacatggat

SEQ ID NO: 619 - DNA, 17 bp, Homo sapiens
cagaatccacatggatg

SEQ ID NO: 620 - DNA, 17 bp, Homo sapiens
agaatccacatggatgg

SEQ ID NO: 621 - DNA, 17 bp, Homo sapiens
gaatccacatggatggg

SEQ ID NO: 622 - DNA, 17 bp, Homo sapiens
aatccacatggatgggg

SEQ ID NO: 623 - DNA, 17 bp, Homo sapiens
atccacatggatggggt

SEQ ID NO: 624 - DNA, 17 bp, Homo sapiens
tccacatggatggggtg

SEQ ID NO: 625 - DNA, 17 bp, Homo sapiens
ccacatggatggggtgc

SEQ ID NO: 626 - DNA, 17 bp, Homo sapiens
cacatggatggggtgcc

SEQ ID NO: 627 - DNA, 17 bp, Homo sapiens
acatggatggggtgcct

SEQ ID NO: 628 - DNA, 17 bp, Homo sapiens
catggatggggtgcctc

SEQ ID NO: 629 - DNA, 17 bp, Homo sapiens
atggatggggtgcctcg

SEQ ID NO: 630 - DNA, 17 bp, Homo sapiens
tggatggggtgcctcga

SEQ ID NO: 631 - DNA, 17 bp, Homo sapiens
ggatggggtgcctcgag

SEQ ID NO: 632 - DNA, 17 bp, Homo sapiens
gatggggtgcctcgagc

SEQ ID NO: 633 - DNA, 17 bp, Homo sapiens
atggggtgcctcgagca

SEQ ID NO: 634 - DNA, 17 bp, Homo sapiens
tggggtgcctcgagcaa

SEQ ID NO: 635 - DNA, 17 bp, Homo sapiens
ggggtgcctcgagcaaa

SEQ ID NO: 636 - DNA, 17 bp, Homo sapiens
gggtgcctcgagcaaag

SEQ ID NO: 637 - DNA, 17 bp, Homo sapiens
ggtgcctcgagcaaagg

SEQ ID NO: 638 - DNA, 17 bp, Homo sapiens
gtgcctcgagcaaaggc

SEQ ID NO: 639 - DNA, 17 bp, Homo sapiens
tgcctcgagcaaaggcc

SEQ ID NO: 640 - DNA, 17 bp, Homo sapiens
gcctcgagcaaaggcct

SEQ ID NO: 641 - DNA, 17 bp, Homo sapiens
cctcgagcaaaggcctt

SEQ ID NO: 642 - DNA, 17 bp, Homo sapiens
ctcgagcaaaggcctta

SEQ ID NO: 643 - DNA, 17 bp, Homo sapiens
tcgagcaaaggccttat

SEQ ID NO: 644 - DNA, 17 bp, Homo sapiens
cgagcaaaggccttatg

SEQ ID NO: 645 - DNA, 17 bp, Homo sapiens
gagcaaaggccttatgc

SEQ ID NO: 646 - DNA, 17 bp, Homo sapiens
agcaaaggccttatgca

SEQ ID NO: 647 - DNA, 17 bp, Homo sapiens
gcaaaggccttatgcaa

SEQ ID NO: 648 - DNA, 17 bp, Homo sapiens
caaaggccttatgcaac

SEQ ID NO: 649 - DNA, 17 bp, Homo sapiens
aaaggccttatgcaact

SEQ ID NO: 650 - DNA, 17 bp, Homo sapiens
aaggccttatgcaacta

SEQ ID NO: 651 - DNA, 17 bp, Homo sapiens
aggccttatgcaactac

SEQ ID NO: 652 - DNA, 17 bp, Homo sapiens
ggccttatgcaactaca

SEQ ID NO: 653 - DNA, 17 bp, Homo sapiens
gccttatgcaactacag

SEQ ID NO: 654 - DNA, 17 bp, Homo sapiens
ccttatgcaactacaga

SEQ ID NO: 655 - DNA, 17 bp, Homo sapiens
cttatgcaactacagag

SEQ ID NO: 656 - DNA, 17 bp, Homo sapiens
ttatgcaactacagagg

SEQ ID NO: 657 - DNA, 17 bp, Homo sapiens
tatgcaactacagaggg

SEQ ID NO: 658 - DNA, 17 bp, Homo sapiens
atgcaactacagagggc

SEQ ID NO: 659 - DNA, 17 bp, Homo sapiens
tgcaactacagagggca

SEQ ID NO: 660 - DNA, 17 bp, Homo sapiens
gcaactacagagggcag

SEQ ID NO: 661 - DNA, 17 bp, Homo sapiens
caactacagagggcaga

SEQ ID NO: 662 - DNA, 17 bp, Homo sapiens
aactacagagggcagaa

SEQ ID NO: 663 - DNA, 17 bp, Homo sapiens
actacagagggcagaat

SEQ ID NO: 664 - DNA, 17 bp, Homo sapiens
ctacagagggcagaatc

SEQ ID NO: 665 - DNA, 17 bp, Homo sapiens
tacagagggcagaatcc

SEQ ID NO: 666 - DNA, 17 bp, Homo sapiens
acagagggcagaatccc

SEQ ID NO: 667 - DNA, 17 bp, Homo sapiens
cagagggcagaatcccg

SEQ ID NO: 668 - DNA, 17 bp, Homo sapiens
agagggcagaatcccgg

SEQ ID NO: 669 - DNA, 17 bp, Homo sapiens
gagggcagaatcccggt

SEQ ID NO: 670 - DNA, 17 bp, Homo sapiens
agggcagaatcccggtg

SEQ ID NO: 671 - DNA, 17 bp, Homo sapiens
gggcagaatcccggtga

SEQ ID NO: 672 - DNA, 17 bp, Homo sapiens
ggcagaatcccggtgac

SEQ ID NO: 673 - DNA, 17 bp, Homo sapiens
gcagaatcccggtgacc

SEQ ID NO: 674 - DNA, 17 bp, Homo sapiens
cagaatcccggtgacct

SEQ ID NO: 675 - DNA, 17 bp, Homo sapiens
agaatcccggtgaccta

SEQ ID NO: 676 - DNA, 17 bp, Homo sapiens
gaatcccggtgacctaa

SEQ ID NO: 677 - DNA, 17 bp, Homo sapiens
aatcccggtgacctaag

SEQ ID NO: 678 - DNA, 17 bp, Homo sapiens
atcccggtgacctaagg

SEQ ID NO: 679 - DNA, 17 bp, Homo sapiens
tcccggtgacctaaggt

SEQ ID NO: 680 - DNA, 17 bp, Homo sapiens
cccggtgacctaaggtt

SEQ ID NO: 681 - DNA, 17 bp, Homo sapiens
ccggtgacctaaggttt

SEQ ID NO: 682 - DNA, 17 bp, Homo sapiens
cggtgacctaaggttta

SEQ ID NO: 683 - DNA, 17 bp, Homo sapiens
ggtgacctaaggtttaa

SEQ ID NO: 684 - DNA, 17 bp, Homo sapiens
gtgacctaaggtttaat

SEQ ID NO: 685 - DNA, 17 bp, Homo sapiens
tgacctaaggtttaata

SEQ ID NO: 686 - DNA, 17 bp, Homo sapiens
gacctaaggtttaataa

SEQ ID NO: 687 - DNA, 17 bp, Homo sapiens
acctaaggtttaataag

SEQ ID NO: 688 - DNA, 17 bp, Homo sapiens
cctaaggtttaataagg

SEQ ID NO: 689 - DNA, 17 bp, Homo sapiens
ctaaggtttaataaggg

SEQ ID NO: 690 - DNA, 17 bp, Homo sapiens
taaggtttaataaggga

SEQ ID NO: 691 - DNA, 17 bp, Homo sapiens
aaggtttaataagggag

SEQ ID NO: 692 - DNA, 17 bp, Homo sapiens
aggtttaataagggaga

SEQ ID NO: 693 - DNA, 17 bp, Homo sapiens
ggtttaataagggagat

SEQ ID NO: 694 - DNA, 17 bp, Homo sapiens
gtttaataagggagata

SEQ ID NO: 695 - DNA, 17 bp, Homo sapiens
tttaataagggagatat

SEQ ID NO: 696 - DNA, 17 bp, Homo sapiens
ttaataagggagatatc

SEQ ID NO: 697 - DNA, 17 bp, Homo sapiens
taataagggagatatca

SEQ ID NO: 698 - DNA, 17 bp, Homo sapiens
aataagggagatatcat

SEQ ID NO: 699 - DNA, 17 bp, Homo sapiens
ataagggagatatcatc

SEQ ID NO: 700 - DNA, 17 bp, Homo sapiens
taagggagatatcatcc

SEQ ID NO: 701 - DNA, 17 bp, Homo sapiens
aagggagatatcatcct

SEQ ID NO: 702 - DNA, 17 bp, Homo sapiens
agggagatatcatcctt

SEQ ID NO: 703 - DNA, 17 bp, Homo sapiens
gggagatatcatccttc

SEQ ID NO: 704 - DNA, 17 bp, Homo sapiens
ggagatatcatccttct

SEQ ID NO: 705 - DNA, 17 bp, Homo sapiens
gagatatcatccttctc

SEQ ID NO: 706 - DNA, 17 bp, Homo sapiens
agatatcatccttctcc

SEQ ID NO: 707 - DNA, 17 bp, Homo sapiens
gatatcatccttctccg

SEQ ID NO: 708 - DNA, 17 bp, Homo sapiens
atatcatccttctccgg

SEQ ID NO: 709 - DNA, 17 bp, Homo sapiens
tatcatccttctccgga

SEQ ID NO: 710 - DNA, 17 bp, Homo sapiens
atcatccttctccggag

SEQ ID NO: 711 - DNA, 17 bp, Homo sapiens
tcatccttctccggaga

SEQ ID NO: 712 - DNA, 17 bp, Homo sapiens
catccttctccggagac

SEQ ID NO: 713 - DNA, 17 bp, Homo sapiens
atccttctccggagaca

SEQ ID NO: 714 - DNA, 17 bp, Homo sapiens
tccttctccggagacag

SEQ ID NO: 715 - DNA, 17 bp, Homo sapiens
ccttctccggagacagc

SEQ ID NO: 716 - DNA, 17 bp, Homo sapiens
cttctccggagacagct

SEQ ID NO: 717 - DNA, 17 bp, Homo sapiens
ttctccggagacagctt

SEQ ID NO: 718 - DNA, 17 bp, Homo sapiens
tctccggagacagcttg

SEQ ID NO: 719 - DNA, 17 bp, Homo sapiens
ctccggagacagcttga

SEQ ID NO: 720 - DNA, 17 bp, Homo sapiens
tccggagacagcttgat

SEQ ID NO: 721 - DNA, 17 bp, Homo sapiens
ccggagacagcttgatg

SEQ ID NO: 722 - DNA, 17 bp, Homo sapiens
cggagacagcttgatga

SEQ ID NO: 723 - DNA, 17 bp, Homo sapiens
ggagacagcttgatgag

SEQ ID NO: 724 - DNA, 17 bp, Homo sapiens
gagacagcttgatgaga

SEQ ID NO: 725 - DNA, 17 bp, Homo sapiens
agacagcttgatgagaa

SEQ ID NO: 726 - DNA, 17 bp, Homo sapiens
gacagcttgatgagaat

SEQ ID NO: 727 - DNA, 17 bp, Homo sapiens
acagcttgatgagaatt

SEQ ID NO: 728 - DNA, 17 bp, Homo sapiens
cagcttgatgagaattg

SEQ ID NO: 729 - DNA, 17 bp, Homo sapiens
agcttgatgagaattgg

SEQ ID NO: 730 - DNA, 17 bp, Homo sapiens
gcttgatgagaattggt

SEQ ID NO: 731 - DNA, 17 bp, Homo sapiens
cttgatgagaattggta

SEQ ID NO: 732 - DNA, 17 bp, Homo sapiens
ttgatgagaattggtac

SEQ ID NO: 733 - DNA, 17 bp, Homo sapiens
tgatgagaattggtacc

SEQ ID NO: 734 - DNA, 17 bp, Homo sapiens
gatgagaattggtacca

SEQ ID NO: 735 - DNA, 17 bp, Homo sapiens
atgagaattggtaccag

SEQ ID NO: 736 - DNA, 17 bp, Homo sapiens
tgagaattggtaccagg

SEQ ID NO: 737 - DNA, 17 bp, Homo sapiens
gagaattggtaccaggg

SEQ ID NO: 738 - DNA, 17 bp, Homo sapiens
agaattggtaccagggg

SEQ ID NO: 739 - DNA, 17 bp, Homo sapiens
gaattggtaccaggggg

SEQ ID NO: 740 - DNA, 17 bp, Homo sapiens
aattggtaccaggggga

SEQ ID NO: 741 - DNA, 17 bp, Homo sapiens
attggtaccagggggaa

SEQ ID NO: 742 - DNA, 17 bp, Homo sapiens
ttggtaccagggggaaa

SEQ ID NO: 743 - DNA, 17 bp, Homo sapiens
tggtaccagggggaaat

SEQ ID NO: 744 - DNA, 17 bp, Homo sapiens
ggtaccagggggaaatc

SEQ ID NO: 745 - DNA, 17 bp, Homo sapiens
gtaccagggggaaatca

SEQ ID NO: 746 - DNA, 17 bp, Homo sapiens
taccagggggaaatcaa

SEQ ID NO: 747 - DNA, 17 bp, Homo sapiens
accagggggaaatcaat

SEQ ID NO: 748 - DNA, 17 bp, Homo sapiens
ccagggggaaatcaatg

SEQ ID NO: 749 - DNA, 17 bp, Homo sapiens
cagggggaaatcaatgg

SEQ ID NO: 750 - DNA, 17 bp, Homo sapiens
agggggaaatcaatggc

SEQ ID NO: 751 - DNA, 17 bp, Homo sapiens
gggggaaatcaatggca

SEQ ID NO: 752 - DNA, 17 bp, Homo sapiens
ggggaaatcaatggcat

SEQ ID NO: 753 - DNA, 17 bp, Homo sapiens
gggaaatcaatggcatc

SEQ ID NO: 754 - DNA, 17 bp, Homo sapiens
ggaaatcaatggcatca

SEQ ID NO: 755 - DNA, 17 bp, Homo sapiens
gaaatcaatggcatcag

SEQ ID NO: 756 - DNA, 17 bp, Homo sapiens
aaatcaatggcatcagc

SEQ ID NO: 757 - DNA, 17 bp, Homo sapiens
aatcaatggcatcagcg

SEQ ID NO: 758 - DNA, 17 bp, Homo sapiens
atcaatggcatcagcgg

SEQ ID NO: 759 - DNA, 17 bp, Homo sapiens
tcaatggcatcagcggg

SEQ ID NO: 760 - DNA, 17 bp, Homo sapiens
caatggcatcagcggga

SEQ ID NO: 761 - DNA, 17 bp, Homo sapiens
aatggcatcagcgggaa

SEQ ID NO: 762 - DNA, 17 bp, Homo sapiens
atggcatcagcgggaac

SEQ ID NO: 763 - DNA, 17 bp, Homo sapiens
tggcatcagcgggaact

SEQ ID NO: 764 - DNA, 17 bp, Homo sapiens
ggcatcagcgggaactt

SEQ ID NO: 765 - DNA, 17 bp, Homo sapiens
gcatcagcgggaacttc

SEQ ID NO: 766 - DNA, 17 bp, Homo sapiens
catcagcgggaacttcc

SEQ ID NO: 767 - DNA, 17 bp, Homo sapiens
atcagcgggaacttccc

SEQ ID NO: 768 - DNA, 17 bp, Homo sapiens
tcagcgggaacttccca

SEQ ID NO: 769 - DNA, 17 bp, Homo sapiens
cagcgggaacttcccag

SEQ ID NO: 770 - DNA, 17 bp, Homo sapiens
agcgggaacttcccagc

SEQ ID NO: 771 - DNA, 17 bp, Homo sapiens
gcgggaacttcccagcc

SEQ ID NO: 772 - DNA, 17 bp, Homo sapiens
cgggaacttcccagcca

SEQ ID NO: 773 - DNA, 17 bp, Homo sapiens
gggaacttcccagccag

SEQ ID NO: 774 - DNA, 17 bp, Homo sapiens
ggaacttcccagccagc

SEQ ID NO: 775 - DNA, 17 bp, Homo sapiens
gaacttcccagccagct

SEQ ID NO: 776 - DNA, 17 bp, Homo sapiens
aacttcccagccagctc

SEQ ID NO: 777 - DNA, 17 bp, Homo sapiens
acttcccagccagctcc

SEQ ID NO: 778 - DNA, 17 bp, Homo sapiens
cttcccagccagctccg

SEQ ID NO: 779 - DNA, 17 bp, Homo sapiens
ttcccagccagctccgt

SEQ ID NO: 780 - DNA, 17 bp, Homo sapiens
tcccagccagctccgtg

SEQ ID NO: 781 - DNA, 17 bp, Homo sapiens
cccagccagctccgtgg

SEQ ID NO: 782 - DNA, 17 bp, Homo sapiens
ccagccagctccgtgga

SEQ ID NO: 783 - DNA, 17 bp, Homo sapiens
cagccagctccgtggaa

SEQ ID NO: 784 - DNA, 17 bp, Homo sapiens
agccagctccgtggaag

SEQ ID NO: 785 - DNA, 17 bp, Homo sapiens
gccagctccgtggaagt

SEQ ID NO: 786 - DNA, 17 bp, Homo sapiens
ccagctccgtggaagtc

SEQ ID NO: 787 - DNA, 17 bp, Homo sapiens
cagctccgtggaagtca

SEQ ID NO: 788 - DNA, 17 bp, Homo sapiens
agctccgtggaagtcat

SEQ ID NO: 789 - DNA, 17 bp, Homo sapiens
gctccgtggaagtcatc

SEQ ID NO: 790 - DNA, 17 bp, Homo sapiens
ctccgtggaagtcatca

SEQ ID NO: 791 - DNA, 17 bp, Homo sapiens
tccgtggaagtcatcaa

SEQ ID NO: 792 - DNA, 17 bp, Homo sapiens
ccgtggaagtcatcaag

SEQ ID NO: 793 - DNA, 17 bp, Homo sapiens
cgtggaagtcatcaagc

SEQ ID NO: 794 - DNA, 17 bp, Homo sapiens
gtggaagtcatcaagca

SEQ ID NO: 795 - DNA, 17 bp, Homo sapiens
tggaagtcatcaagcag

SEQ ID NO: 796 - DNA, 17 bp, Homo sapiens
ggaagtcatcaagcagc

SEQ ID NO: 797 - DNA, 17 bp, Homo sapiens
gaagtcatcaagcagct

SEQ ID NO: 798 - DNA, 17 bp, Homo sapiens
aagtcatcaagcagctg

SEQ ID NO: 799 - DNA, 17 bp, Homo sapiens
agtcatcaagcagctgc

SEQ ID NO: 800 - DNA, 17 bp, Homo sapiens
gtcatcaagcagctgcc

SEQ ID NO: 801 - DNA, 17 bp, Homo sapiens
tcatcaagcagctgccc

SEQ ID NO: 802 - DNA, 17 bp, Homo sapiens
catcaagcagctgcccc

SEQ ID NO: 803 - DNA, 17 bp, Homo sapiens
atcaagcagctgcccca

SEQ ID NO: 804 - DNA, 17 bp, Homo sapiens
tcaagcagctgccccag

SEQ ID NO: 805 - DNA, 17 bp, Homo sapiens
caagcagctgccccagc

SEQ ID NO: 806 - DNA, 17 bp, Homo sapiens
aagcagctgccccagcc

SEQ ID NO: 807 - DNA, 17 bp, Homo sapiens
agcagctgccccagccg

SEQ ID NO: 808 - DNA, 17 bp, Homo sapiens
gcagctgccccagccgc

SEQ ID NO: 809 - DNA, 17 bp, Homo sapiens
cagctgccccagccgcc

SEQ ID NO: 810 - DNA, 17 bp, Homo sapiens
agctgccccagccgccc

SEQ ID NO: 811 - DNA, 17 bp, Homo sapiens
gctgccccagccgcccc

SEQ ID NO: 812 - DNA, 17 bp, Homo sapiens
ctgccccagccgccccc

SEQ ID NO: 813 - DNA, 17 bp, Homo sapiens
tgccccagccgcccccg

SEQ ID NO: 814 - DNA, 17 bp, Homo sapiens
gccccagccgcccccgc

SEQ ID NO: 815 - DNA, 17 bp, Homo sapiens
ccccagccgcccccgct

SEQ ID NO: 816 - DNA, 17 bp, Homo sapiens
cccagccgcccccgctc

SEQ ID NO: 817 - DNA, 17 bp, Homo sapiens
ccagccgcccccgctct

SEQ ID NO: 818 - DNA, 17 bp, Homo sapiens
cagccgcccccgctctg

SEQ ID NO: 819 - DNA, 17 bp, Homo sapiens
agccgcccccgctctgc

SEQ ID NO: 820 - DNA, 17 bp, Homo sapiens
gccgcccccgctctgca

SEQ ID NO: 821 - DNA, 17 bp, Homo sapiens
ccgcccccgctctgcag

SEQ ID NO: 822 - DNA, 17 bp, Homo sapiens
cgcccccgctctgcagg

SEQ ID NO: 823 - DNA, 17 bp, Homo sapiens
gcccccgctctgcaggg

SEQ ID NO: 824 - DNA, 17 bp, Homo sapiens
cccccgctctgcagggc

SEQ ID NO: 825 - DNA, 17 bp, Homo sapiens
ccccgctctgcagggcc

SEQ ID NO: 826 - DNA, 17 bp, Homo sapiens
cccgctctgcagggccc

SEQ ID NO: 827 - DNA, 17 bp, Homo sapiens
ccgctctgcagggccct

SEQ ID NO: 828 - DNA, 17 bp, Homo sapiens
cgctctgcagggccctc

SEQ ID NO: 829 - DNA, 17 bp, Homo sapiens
gctctgcagggccctct

SEQ ID NO: 830 - DNA, 17 bp, Homo sapiens
ctctgcagggccctcta

SEQ ID NO: 831 - DNA, 17 bp, Homo sapiens
tctgcagggccctctac

SEQ ID NO: 832 - DNA, 17 bp, Homo sapiens
ctgcagggccctctaca

SEQ ID NO: 833 - DNA, 17 bp, Homo sapiens
tgcagggccctctacaa

SEQ ID NO: 834 - DNA, 17 bp, Homo sapiens
gcagggccctctacaac

SEQ ID NO: 835 - DNA, 17 bp, Homo sapiens
cagggccctctacaact

SEQ ID NO: 836 - DNA, 17 bp, Homo sapiens
agggccctctacaactt

SEQ ID NO: 837 - DNA, 17 bp, Homo sapiens
gggccctctacaacttc

SEQ ID NO: 838 - DNA, 17 bp, Homo sapiens
ggccctctacaacttcg

SEQ ID NO: 839 - DNA, 17 bp, Homo sapiens
gccctctacaacttcga

SEQ ID NO: 840 - DNA, 17 bp, Homo sapiens
ccctctacaacttcgac

SEQ ID NO: 841 - DNA, 17 bp, Homo sapiens
cctctacaacttcgacc

SEQ ID NO: 842 - DNA, 17 bp, Homo sapiens
ctctacaacttcgacct

SEQ ID NO: 843 - DNA, 17 bp, Homo sapiens
tctacaacttcgaccta

SEQ ID NO: 844 - DNA, 17 bp, Homo sapiens
ctacaacttcgacctac

SEQ ID NO: 845 - DNA, 17 bp, Homo sapiens
tacaacttcgacctacg

SEQ ID NO: 846 - DNA, 17 bp, Homo sapiens
acaacttcgacctacga

SEQ ID NO: 847 - DNA, 17 bp, Homo sapiens
caacttcgacctacgag

SEQ ID NO: 848 - DNA, 17 bp, Homo sapiens
aacttcgacctacgagg

SEQ ID NO: 849 - DNA, 17 bp, Homo sapiens
acttcgacctacgaggc

SEQ ID NO: 850 - DNA, 17 bp, Homo sapiens
cttcgacctacgaggca

SEQ ID NO: 851 - DNA, 17 bp, Homo sapiens
ttcgacctacgaggcaa

SEQ ID NO: 852 - DNA, 17 bp, Homo sapiens
tcgacctacgaggcaag

SEQ ID NO: 853 - DNA, 17 bp, Homo sapiens
cgacctacgaggcaagg

SEQ ID NO: 854 - DNA, 17 bp, Homo sapiens
gacctacgaggcaagga

SEQ ID NO: 855 - DNA, 17 bp, Homo sapiens
acctacgaggcaaggac

SEQ ID NO: 856 - DNA, 17 bp, Homo sapiens
cctacgaggcaaggaca

SEQ ID NO: 857 - DNA, 17 bp, Homo sapiens
ctacgaggcaaggacaa

SEQ ID NO: 858 - DNA, 17 bp, Homo sapiens
tacgaggcaaggacaag

SEQ ID NO: 859 - DNA, 17 bp, Homo sapiens
acgaggcaaggacaaga

SEQ ID NO: 860 - DNA, 17 bp, Homo sapiens
cgaggcaaggacaagag

SEQ ID NO: 861 - DNA, 17 bp, Homo sapiens
gaggcaaggacaagagt

SEQ ID NO: 862 - DNA, 17 bp, Homo sapiens
aggcaaggacaagagtg

SEQ ID NO: 863 - DNA, 17 bp, Homo sapiens
ggcaaggacaagagtga

SEQ ID NO: 864 - DNA, 17 bp, Homo sapiens
gcaaggacaagagtgag

SEQ ID NO: 865 - DNA, 17 bp, Homo sapiens
caaggacaagagtgaga

SEQ ID NO: 866 - DNA, 17 bp, Homo sapiens
aaggacaagagtgagaa

SEQ ID NO: 867 - DNA, 17 bp, Homo sapiens
aggacaagagtgagaac

SEQ ID NO: 868 - DNA, 17 bp, Homo sapiens
ggacaagagtgagaacc

SEQ ID NO: 869 - DNA, 17 bp, Homo sapiens
gacaagagtgagaacca

SEQ ID NO: 870 - DNA, 17 bp, Homo sapiens
acaagagtgagaaccag

SEQ ID NO: 871 - DNA, 17 bp, Homo sapiens
caagagtgagaaccagg

SEQ ID NO: 872 - DNA, 17 bp, Homo sapiens
aagagtgagaaccagga

SEQ ID NO: 873 - DNA, 17 bp, Homo sapiens
agagtgagaaccaggat

SEQ ID NO: 874 - DNA, 17 bp, Homo sapiens
gagtgagaaccaggatt

SEQ ID NO: 875 - DNA, 17 bp, Homo sapiens
agtgagaaccaggattg

SEQ ID NO: 876 - DNA, 17 bp, Homo sapiens
gtgagaaccaggattgc

SEQ ID NO: 877 - DNA, 17 bp, Homo sapiens
tgagaaccaggattgcc

SEQ ID NO: 878 - DNA, 17 bp, Homo sapiens
gagaaccaggattgcct

SEQ ID NO: 879 - DNA, 17 bp, Homo sapiens
agaaccaggattgcctg

SEQ ID NO: 880 - DNA, 17 bp, Homo sapiens
gaaccaggattgcctga

SEQ ID NO: 881 - DNA, 17 bp, Homo sapiens
aaccaggattgcctgac

SEQ ID NO: 882 - DNA, 17 bp, Homo sapiens
accaggattgcctgacc

SEQ ID NO: 883 - DNA, 17 bp, Homo sapiens
ccaggattgcctgacct

SEQ ID NO: 884 - DNA, 17 bp, Homo sapiens
caggattgcctgacctt

SEQ ID NO: 885 - DNA, 17 bp, Homo sapiens
aggattgcctgaccttc

SEQ ID NO: 886 - DNA, 17 bp, Homo sapiens
ggattgcctgaccttcc

SEQ ID NO: 887 - DNA, 17 bp, Homo sapiens
gattgcctgaccttcct

SEQ ID NO: 888 - DNA, 17 bp, Homo sapiens
attgcctgaccttcctc

SEQ ID NO: 889 - DNA, 17 bp, Homo sapiens
ttgcctgaccttcctca

SEQ ID NO: 890 - DNA, 17 bp, Homo sapiens
tgcctgaccttcctcaa

SEQ ID NO: 891 - DNA, 17 bp, Homo sapiens
gcctgaccttcctcaag

SEQ ID NO: 892 - DNA, 17 bp, Homo sapiens
cctgaccttcctcaagg

SEQ ID NO: 893 - DNA, 17 bp, Homo sapiens
ctgaccttcctcaagga

SEQ ID NO: 894 - DNA, 17 bp, Homo sapiens
tgaccttcctcaaggac

SEQ ID NO: 895 - DNA, 17 bp, Homo sapiens
gaccttcctcaaggacg

SEQ ID NO: 896 - DNA, 17 bp, Homo sapiens
accttcctcaaggacga

SEQ ID NO: 897 - DNA, 17 bp, Homo sapiens
ccttcctcaaggacgat

SEQ ID NO: 898 - DNA, 17 bp, Homo sapiens
cttcctcaaggacgata

SEQ ID NO: 899 - DNA, 17 bp, Homo sapiens
ttcctcaaggacgatat

SEQ ID NO: 900 - DNA, 17 bp, Homo sapiens
tcctcaaggacgatatc

SEQ ID NO: 901 - DNA, 17 bp, Homo sapiens
cctcaaggacgatatca

SEQ ID NO: 902 - DNA, 17 bp, Homo sapiens
ctcaaggacgatatcat

SEQ ID NO: 903 - DNA, 17 bp, Homo sapiens
tcaaggacgatatcatc

SEQ ID NO: 904 - DNA, 17 bp, Homo sapiens
caaggacgatatcatca

SEQ ID NO: 905 - DNA, 17 bp, Homo sapiens
aaggacgatatcatcac

SEQ ID NO: 906 - DNA, 17 bp, Homo sapiens
aggacgatatcatcact

SEQ ID NO: 907 - DNA, 17 bp, Homo sapiens
ggacgatatcatcactg

SEQ ID NO: 908 - DNA, 17 bp, Homo sapiens
gacgatatcatcactgt

SEQ ID NO: 909 - DNA, 17 bp, Homo sapiens
acgatatcatcactgtg

SEQ ID NO: 910 - DNA, 17 bp, Homo sapiens
cgatatcatcactgtga

SEQ ID NO: 911 - DNA, 17 bp, Homo sapiens
gatatcatcactgtgat

SEQ ID NO: 912 - DNA, 17 bp, Homo sapiens
atatcatcactgtgatc

SEQ ID NO: 913 - DNA, 17 bp, Homo sapiens
tatcatcactgtgatca

SEQ ID NO: 914 - DNA, 17 bp, Homo sapiens
atcatcactgtgatcag

SEQ ID NO: 915 - DNA, 17 bp, Homo sapiens
tcatcactgtgatcagc

SEQ ID NO: 916 - DNA, 17 bp, Homo sapiens
catcactgtgatcagcc

SEQ ID NO: 917 - DNA, 17 bp, Homo sapiens
atcactgtgatcagccg

SEQ ID NO: 918 - DNA, 17 bp, Homo sapiens
tcactgtgatcagccga

SEQ ID NO: 919 - DNA, 17 bp, Homo sapiens
cactgtgatcagccgag

SEQ ID NO: 920 - DNA, 17 bp, Homo sapiens
actgtgatcagccgagt

SEQ ID NO: 921 - DNA, 17 bp, Homo sapiens
ctgtgatcagccgagtg

SEQ ID NO: 922 - DNA, 17 bp, Homo sapiens
tgtgatcagccgagtgg

SEQ ID NO: 923 - DNA, 17 bp, Homo sapiens
gtgatcagccgagtgga

SEQ ID NO: 924 - DNA, 17 bp, Homo sapiens
tgatcagccgagtggat

SEQ ID NO: 925 - DNA, 17 bp, Homo sapiens
gatcagccgagtggatg

SEQ ID NO: 926 - DNA, 17 bp, Homo sapiens
atcagccgagtggatga

SEQ ID NO: 927 - DNA, 17 bp, Homo sapiens
tcagccgagtggatgag

SEQ ID NO: 928 - DNA, 17 bp, Homo sapiens
cagccgagtggatgaga

SEQ ID NO: 929 - DNA, 17 bp, Homo sapiens
agccgagtggatgagaa

SEQ ID NO: 930 - DNA, 17 bp, Homo sapiens
gccgagtggatgagaac

SEQ ID NO: 931 - DNA, 17 bp, Homo sapiens
ccgagtggatgagaact

SEQ ID NO: 932 - DNA, 17 bp, Homo sapiens
cgagtggatgagaactg

SEQ ID NO: 933 - DNA, 17 bp, Homo sapiens
gagtggatgagaactgg

SEQ ID NO: 934 - DNA, 17 bp, Homo sapiens
agtggatgagaactggg

SEQ ID NO: 935 - DNA, 17 bp, Homo sapiens
gtggatgagaactgggc

SEQ ID NO: 936 - DNA, 17 bp, Homo sapiens
tggatgagaactgggca

SEQ ID NO: 937 - DNA, 17 bp, Homo sapiens
ggatgagaactgggcag

SEQ ID NO: 938 - DNA, 17 bp, Homo sapiens
gatgagaactgggcaga

SEQ ID NO: 939 - DNA, 17 bp, Homo sapiens
atgagaactgggcagaa

SEQ ID NO: 940 - DNA, 17 bp, Homo sapiens
tgagaactgggcagaag

SEQ ID NO: 941 - DNA, 17 bp, Homo sapiens
gagaactgggcagaagg

SEQ ID NO: 942 - DNA, 17 bp, Homo sapiens
agaactgggcagaaggc

SEQ ID NO: 943 - DNA, 17 bp, Homo sapiens
gaactgggcagaaggca

SEQ ID NO: 944 - DNA, 17 bp, Homo sapiens
aactgggcagaaggcaa

SEQ ID NO: 945 - DNA, 17 bp, Homo sapiens
actgggcagaaggcaag

SEQ ID NO: 946 - DNA, 17 bp, Homo sapiens
ctgggcagaaggcaagt

SEQ ID NO: 947 - DNA, 17 bp, Homo sapiens
tgggcagaaggcaagtt

SEQ ID NO: 948 - DNA, 17 bp, Homo sapiens
gggcagaaggcaagtta

SEQ ID NO: 949 - DNA, 17 bp, Homo sapiens
ggcagaaggcaagttag

SEQ ID NO: 950 - DNA, 17 bp, Homo sapiens
gcagaaggcaagttagg

SEQ ID NO: 951 - DNA, 17 bp, Homo sapiens
cagaaggcaagttagga

SEQ ID NO: 952 - DNA, 17 bp, Homo sapiens
agaaggcaagttaggag

SEQ ID NO: 953 - DNA, 17 bp, Homo sapiens
gaaggcaagttaggaga

SEQ ID NO: 954 - DNA, 17 bp, Homo sapiens
aaggcaagttaggagat

SEQ ID NO: 955 - DNA, 17 bp, Homo sapiens
aggcaagttaggagata

SEQ ID NO: 956 - DNA, 17 bp, Homo sapiens
ggcaagttaggagataa

SEQ ID NO: 957 - DNA, 17 bp, Homo sapiens
gcaagttaggagataaa

SEQ ID NO: 958 - DNA, 17 bp, Homo sapiens
caagttaggagataaag

SEQ ID NO: 959 - DNA, 17 bp, Homo sapiens
aagttaggagataaagt

SEQ ID NO: 960 - DNA, 17 bp, Homo sapiens
agttaggagataaagta

SEQ ID NO: 961 - DNA, 17 bp, Homo sapiens
gttaggagataaagtag

SEQ ID NO: 962 - DNA, 17 bp, Homo sapiens
ttaggagataaagtagg

SEQ ID NO: 963 - DNA, 17 bp, Homo sapiens
taggagataaagtaggc

SEQ ID NO: 964 - DNA, 17 bp, Homo sapiens
aggagataaagtaggca

SEQ ID NO: 965 - DNA, 17 bp, Homo sapiens
ggagataaagtaggcat

SEQ ID NO: 966 - DNA, 17 bp, Homo sapiens
gagataaagtaggcatc

SEQ ID NO: 967 - DNA, 17 bp, Homo sapiens
agataaagtaggcatct

SEQ ID NO: 968 - DNA, 17 bp, Homo sapiens
gataaagtaggcatctt

SEQ ID NO: 969 - DNA, 17 bp, Homo sapiens
ataaagtaggcatcttc

SEQ ID NO: 970 - DNA, 17 bp, Homo sapiens
taaagtaggcatcttcc

SEQ ID NO: 971 - DNA, 17 bp, Homo sapiens
aaagtaggcatcttccc

SEQ ID NO: 972 - DNA, 17 bp, Homo sapiens
aagtaggcatcttccct

SEQ ID NO: 973 - DNA, 17 bp, Homo sapiens
agtaggcatcttcccta

SEQ ID NO: 974 - DNA, 17 bp, Homo sapiens
gtaggcatcttccctat

SEQ ID NO: 975 - DNA, 17 bp, Homo sapiens
taggcatcttccctatc

SEQ ID NO: 976 - DNA, 17 bp, Homo sapiens
aggcatcttccctatct

SEQ ID NO: 977 - DNA, 17 bp, Homo sapiens
ggcatcttccctatctt

SEQ ID NO: 978 - DNA, 17 bp, Homo sapiens
gcatcttccctatcttg

SEQ ID NO: 979 - DNA, 17 bp, Homo sapiens
catcttccctatcttgt

SEQ ID NO: 980 - DNA, 17 bp, Homo sapiens
atcttccctatcttgtt

SEQ ID NO: 981 - DNA, 17 bp, Homo sapiens
tcttccctatcttgttt

SEQ ID NO: 982 - DNA, 17 bp, Homo sapiens
cttccctatcttgtttg

SEQ ID NO: 983 - DNA, 17 bp, Homo sapiens
ttccctatcttgtttgt

SEQ ID NO: 984 - DNA, 17 bp, Homo sapiens
tccctatcttgtttgta

SEQ ID NO: 985 - DNA, 17 bp, Homo sapiens
ccctatcttgtttgtag

SEQ ID NO: 986 - DNA, 17 bp, Homo sapiens
cctatcttgtttgtaga

SEQ ID NO: 987 - DNA, 17 bp, Homo sapiens
ctatcttgtttgtagag

SEQ ID NO: 988 - DNA, 17 bp, Homo sapiens
tatcttgtttgtagagc

SEQ ID NO: 989 - DNA, 17 bp, Homo sapiens
atcttgtttgtagagcc

SEQ ID NO: 990 - DNA, 17 bp, Homo sapiens
tcttgtttgtagagcca

SEQ ID NO: 991 - DNA, 17 bp, Homo sapiens
cttgtttgtagagccaa

SEQ ID NO: 992 - DNA, 17 bp, Homo sapiens
ttgtttgtagagccaaa

SEQ ID NO: 993 - DNA, 17 bp, Homo sapiens
tgtttgtagagccaaac

SEQ ID NO: 994 - DNA, 17 bp, Homo sapiens
gtttgtagagccaaacc

SEQ ID NO: 995 - DNA, 17 bp, Homo sapiens
tttgtagagccaaacct

SEQ ID NO: 996 - DNA, 17 bp, Homo sapiens
ttgtagagccaaacctc

SEQ ID NO: 997 - DNA, 17 bp, Homo sapiens
tgtagagccaaacctca

SEQ ID NO: 998 - DNA, 17 bp, Homo sapiens
gtagagccaaacctcac

SEQ ID NO: 999 - DNA, 17 bp, Homo sapiens
tagagccaaacctcacc

SEQ ID NO: 1000 - DNA, 17 bp, Homo sapiens
agagccaaacctcaccg

SEQ ID NO: 1001 - DNA, 17 bp, Homo sapiens
gagccaaacctcaccgc

SEQ ID NO: 1002 - DNA, 17 bp, Homo sapiens
agccaaacctcaccgca

SEQ ID NO: 1003 - DNA, 17 bp, Homo sapiens
gccaaacctcaccgcaa

SEQ ID NO: 1004 - DNA, 17 bp, Homo sapiens
ccaaacctcaccgcaag

SEQ ID NO: 1005 - DNA, 17 bp, Homo sapiens
caaacctcaccgcaaga

SEQ ID NO: 1006 - DNA, 17 bp, Homo sapiens
aaacctcaccgcaagac

SEQ ID NO: 1007 - DNA, 17 bp, Homo sapiens
aacctcaccgcaagaca

SEQ ID NO: 1008 - DNA, 17 bp, Homo sapiens
acctcaccgcaagacac

SEQ ID NO: 1009 - DNA, 17 bp, Homo sapiens
cctcaccgcaagacacc

SEQ ID NO: 1010 - DNA, 17 bp, Homo sapiens
ctcaccgcaagacacct

SEQ ID NO: 1011 - DNA, 17 bp, Homo sapiens
tcaccgcaagacacctt

SEQ ID NO: 1012 - DNA, 17 bp, Homo sapiens
caccgcaagacaccttt

SEQ ID NO: 1013 - DNA, 17 bp, Homo sapiens
accgcaagacacctttt

SEQ ID NO: 1014 - DNA, 17 bp, Homo sapiens
ccgcaagacacctttta

SEQ ID NO: 1015 - DNA, 17 bp, Homo sapiens
cgcaagacaccttttag

SEQ ID NO: 1016 - DNA, 17 bp, Homo sapiens
gcaagacaccttttaga

SEQ ID NO: 1017 - DNA, 17 bp, Homo sapiens
caagacaccttttagag

SEQ ID NO: 1018 - DNA, 17 bp, Homo sapiens
aagacaccttttagaga

SEQ ID NO: 1019 - DNA, 17 bp, Homo sapiens
agacaccttttagagaa

SEQ ID NO: 1020 - DNA, 17 bp, Homo sapiens
gacaccttttagagaag

SEQ ID NO: 1021 - DNA, 17 bp, Homo sapiens
acaccttttagagaaga

SEQ ID NO: 1022 - DNA, 17 bp, Homo sapiens
caccttttagagaagaa

SEQ ID NO: 1023 - DNA, 17 bp, Homo sapiens
accttttagagaagaac

SEQ ID NO: 1024 - DNA, 17 bp, Homo sapiens
ccttttagagaagaaca

SEQ ID NO: 1025 - DNA, 17 bp, Homo sapiens
cttttagagaagaacaa

SEQ ID NO: 1026 - DNA, 17 bp, Homo sapiens
ttttagagaagaacaaa

SEQ ID NO: 1027 - DNA, 17 bp, Homo sapiens
tttagagaagaacaaag

SEQ ID NO: 1028 - DNA, 17 bp, Homo sapiens
ttagagaagaacaaagg

SEQ ID NO: 1029 - DNA, 17 bp, Homo sapiens
tagagaagaacaaaggt

SEQ ID NO: 1030 - DNA, 17 bp, Homo sapiens
agagaagaacaaaggtc

SEQ ID NO: 1031 - DNA, 17 bp, Homo sapiens
gagaagaacaaaggtcg

SEQ ID NO: 1032 - DNA, 17 bp, Homo sapiens
agaagaacaaaggtcgc

SEQ ID NO: 1033 - DNA, 17 bp, Homo sapiens
gaagaacaaaggtcgcc

SEQ ID NO: 1034 - DNA, 17 bp, Homo sapiens
aagaacaaaggtcgcca

SEQ ID NO: 1035 - DNA, 17 bp, Homo sapiens
agaacaaaggtcgccag

SEQ ID NO: 1036 - DNA, 17 bp, Homo sapiens
gaacaaaggtcgccagt

SEQ ID NO: 1037 - DNA, 17 bp, Homo sapiens
aacaaaggtcgccagtc

SEQ ID NO: 1038 - DNA, 17 bp, Homo sapiens
acaaaggtcgccagtca

SEQ ID NO: 1039 - DNA, 17 bp, Homo sapiens
caaaggtcgccagtcat

SEQ ID NO: 1040 - DNA, 17 bp, Homo sapiens
aaaggtcgccagtcatc

SEQ ID NO: 1041 - DNA, 17 bp, Homo sapiens
aaggtcgccagtcatcc

SEQ ID NO: 1042 - DNA, 17 bp, Homo sapiens
aggtcgccagtcatcct

SEQ ID NO: 1043 - DNA, 17 bp, Homo sapiens
ggtcgccagtcatcctg

SEQ ID NO: 1044 - DNA, 17 bp, Homo sapiens
gtcgccagtcatcctgc

SEQ ID NO: 1045 - DNA, 17 bp, Homo sapiens
tcgccagtcatcctgca

SEQ ID NO: 1046 - DNA, 17 bp, Homo sapiens
cgccagtcatcctgcac

SEQ ID NO: 1047 - DNA, 17 bp, Homo sapiens
gccagtcatcctgcaca

SEQ ID NO: 1048 - DNA, 17 bp, Homo sapiens
ccagtcatcctgcacaa

SEQ ID NO: 1049 - DNA, 17 bp, Homo sapiens
cagtcatcctgcacaaa

SEQ ID NO: 1050 - DNA, 17 bp, Homo sapiens
agtcatcctgcacaaaa

SEQ ID NO: 1051 - DNA, 17 bp, Homo sapiens
gtcatcctgcacaaaaa

SEQ ID NO: 1052 - DNA, 17 bp, Homo sapiens
tcatcctgcacaaaaaa

SEQ ID NO: 1053 - DNA, 17 bp, Homo sapiens
catcctgcacaaaaaac

SEQ ID NO: 1054 - DNA, 17 bp, Homo sapiens
atcctgcacaaaaaacc

SEQ ID NO: 1055 - DNA, 17 bp, Homo sapiens
tcctgcacaaaaaacct

SEQ ID NO: 1056 - DNA, 17 bp, Homo sapiens
cctgcacaaaaaacctg

SEQ ID NO: 1057 - DNA, 17 bp, Homo sapiens
ctgcacaaaaaacctgt

SEQ ID NO: 1058 - DNA, 17 bp, Homo sapiens
tgcacaaaaaacctgtc

SEQ ID NO: 1059 - DNA, 17 bp, Homo sapiens
gcacaaaaaacctgtcc

SEQ ID NO: 1060 - DNA, 17 bp, Homo sapiens
cacaaaaaacctgtccc

SEQ ID NO: 1061 - DNA, 17 bp, Homo sapiens
acaaaaaacctgtccct

SEQ ID NO: 1062 - DNA, 17 bp, Homo sapiens
caaaaaacctgtccctg

SEQ ID NO: 1063 - DNA, 17 bp, Homo sapiens
aaaaaacctgtccctgg

SEQ ID NO: 1064 - DNA, 17 bp, Homo sapiens
aaaaacctgtccctggt

SEQ ID NO: 1065 - DNA, 17 bp, Homo sapiens
aaaacctgtccctggtg

SEQ ID NO: 1066 - DNA, 17 bp, Homo sapiens
aaacctgtccctggtgt

SEQ ID NO: 1067 - DNA, 17 bp, Homo sapiens
aacctgtccctggtgtc

SEQ ID NO: 1068 - DNA, 17 bp, Homo sapiens
acctgtccctggtgtcc

SEQ ID NO: 1069 - DNA, 17 bp, Homo sapiens
cctgtccctggtgtcct

SEQ ID NO: 1070 - DNA, 17 bp, Homo sapiens
ctgtccctggtgtcctc

SEQ ID NO: 1071 - DNA, 17 bp, Homo sapiens
tgtccctggtgtcctcg

SEQ ID NO: 1072 - DNA, 17 bp, Homo sapiens
gtccctggtgtcctcgt

SEQ ID NO: 1073 - DNA, 17 bp, Homo sapiens
tccctggtgtcctcgtc

SEQ ID NO: 1074 - DNA, 17 bp, Homo sapiens
ccctggtgtcctcgtcc

SEQ ID NO: 1075 - DNA, 17 bp, Homo sapiens
cctggtgtcctcgtcct

SEQ ID NO: 1076 - DNA, 17 bp, Homo sapiens
ctggtgtcctcgtcctc

SEQ ID NO: 1077 - DNA, 17 bp, Homo sapiens
tggtgtcctcgtcctcc

SEQ ID NO: 1078 - DNA, 17 bp, Homo sapiens
ggtgtcctcgtcctcca

SEQ ID NO: 1079 - DNA, 17 bp, Homo sapiens
gtgtcctcgtcctccag

SEQ ID NO: 1080 - DNA, 17 bp, Homo sapiens
tgtcctcgtcctccaga

SEQ ID NO: 1081 - DNA, 17 bp, Homo sapiens
gtcctcgtcctccagag

SEQ ID NO: 1082 - DNA, 17 bp, Homo sapiens
tcctcgtcctccagagg

SEQ ID NO: 1083 - DNA, 17 bp, Homo sapiens
cctcgtcctccagaggc

SEQ ID NO: 1084 - DNA, 17 bp, Homo sapiens
ctcgtcctccagaggca

SEQ ID NO: 1085 - DNA, 17 bp, Homo sapiens
tcgtcctccagaggcaa

SEQ ID NO: 1086 - DNA, 17 bp, Homo sapiens
cgtcctccagaggcaac

SEQ ID NO: 1087 - DNA, 17 bp, Homo sapiens
gtcctccagaggcaaca

SEQ ID NO: 1088 - DNA, 17 bp, Homo sapiens
tcctccagaggcaacac

SEQ ID NO: 1089 - DNA, 17 bp, Homo sapiens
cctccagaggcaacacg

SEQ ID NO: 1090 - DNA, 17 bp, Homo sapiens
ctccagaggcaacacgt

SEQ ID NO: 1091 - DNA, 17 bp, Homo sapiens
tccagaggcaacacgtc

SEQ ID NO: 1092 - DNA, 17 bp, Homo sapiens
ccagaggcaacacgtct

SEQ ID NO: 1093 - DNA, 17 bp, Homo sapiens
cagaggcaacacgtcta

SEQ ID NO: 1094 - DNA, 17 bp, Homo sapiens
agaggcaacacgtctac

SEQ ID NO: 1095 - DNA, 17 bp, Homo sapiens
gaggcaacacgtctacc

SEQ ID NO: 1096 - DNA, 17 bp, Homo sapiens
aggcaacacgtctaccc

SEQ ID NO: 1097 - DNA, 17 bp, Homo sapiens
ggcaacacgtctaccct

SEQ ID NO: 1098 - DNA, 17 bp, Homo sapiens
gcaacacgtctaccctc

SEQ ID NO: 1099 - DNA, 17 bp, Homo sapiens
caacacgtctaccctcc

SEQ ID NO: 1100 - DNA, 17 bp, Homo sapiens
aacacgtctaccctccg

SEQ ID NO: 1101 - DNA, 17 bp, Homo sapiens
acacgtctaccctccgt

SEQ ID NO: 1102 - DNA, 17 bp, Homo sapiens
cacgtctaccctccgta

SEQ ID NO: 1103 - DNA, 17 bp, Homo sapiens
acgtctaccctccgtag

SEQ ID NO: 1104 - DNA, 17 bp, Homo sapiens
cgtctaccctccgtagg

SEQ ID NO: 1105 - DNA, 17 bp, Homo sapiens
gtctaccctccgtaggg

SEQ ID NO: 1106 - DNA, 17 bp, Homo sapiens
tctaccctccgtagggg

SEQ ID NO: 1107 - DNA, 17 bp, Homo sapiens
ctaccctccgtaggggc

SEQ ID NO: 1108 - DNA, 17 bp, Homo sapiens
taccctccgtaggggcc

SEQ ID NO: 1109 - DNA, 17 bp, Homo sapiens
accctccgtaggggccc

SEQ ID NO: 1110 - DNA, 17 bp, Homo sapiens
ccctccgtaggggccca

SEQ ID NO: 1111 - DNA, 17 bp, Homo sapiens
cctccgtaggggcccag

SEQ ID NO: 1112 - DNA, 17 bp, Homo sapiens
ctccgtaggggcccagg

SEQ ID NO: 1113 - DNA, 17 bp, Homo sapiens
tccgtaggggcccaggg

SEQ ID NO: 1114 - DNA, 17 bp, Homo sapiens
ccgtaggggcccagggt

SEQ ID NO: 1115 - DNA, 17 bp, Homo sapiens
cgtaggggcccagggtc

SEQ ID NO: 1116 - DNA, 17 bp, Homo sapiens
gtaggggcccagggtcc

SEQ ID NO: 1117 - DNA, 17 bp, Homo sapiens
taggggcccagggtcca

SEQ ID NO: 1118 - DNA, 17 bp, Homo sapiens
aggggcccagggtccag

SEQ ID NO: 1119 - DNA, 17 bp, Homo sapiens
ggggcccagggtccagg

SEQ ID NO: 1120 - DNA, 17 bp, Homo sapiens
gggcccagggtccagga

SEQ ID NO: 1121 - DNA, 17 bp, Homo sapiens
ggcccagggtccaggag

SEQ ID NO: 1122 - DNA, 17 bp, Homo sapiens
gcccagggtccaggagg

SEQ ID NO: 1123 - DNA, 17 bp, Homo sapiens
cccagggtccaggagga

SEQ ID NO: 1124 - DNA, 17 bp, Homo sapiens
ccagggtccaggaggaa

SEQ ID NO: 1125 - DNA, 17 bp, Homo sapiens
cagggtccaggaggaag

SEQ ID NO: 1126 - DNA, 17 bp, Homo sapiens
agggtccaggaggaagg

SEQ ID NO: 1127 - DNA, 17 bp, Homo sapiens
gggtccaggaggaaggt

SEQ ID NO: 1128 - DNA, 17 bp, Homo sapiens
ggtccaggaggaaggtg

SEQ ID NO: 1129 - DNA, 17 bp, Homo sapiens
gtccaggaggaaggtgc

SEQ ID NO: 1130 - DNA, 17 bp, Homo sapiens
tccaggaggaaggtgcc

SEQ ID NO: 1131 - DNA, 17 bp, Homo sapiens
ccaggaggaaggtgcct

SEQ ID NO: 1132 - DNA, 17 bp, Homo sapiens
caggaggaaggtgcctg

SEQ ID NO: 1133 - DNA, 17 bp, Homo sapiens
aggaggaaggtgcctgg

SEQ ID NO: 1134 - DNA, 17 bp, Homo sapiens
ggaggaaggtgcctggg

SEQ ID NO: 1135 - DNA, 17 bp, Homo sapiens
gaggaaggtgcctgggc

SEQ ID NO: 1136 - DNA, 17 bp, Homo sapiens
aggaaggtgcctgggca

SEQ ID NO: 1137 - DNA, 17 bp, Homo sapiens
ggaaggtgcctgggcag

SEQ ID NO: 1138 - DNA, 17 bp, Homo sapiens
gaaggtgcctgggcagt

SEQ ID NO: 1139 - DNA, 17 bp, Homo sapiens
aaggtgcctgggcagtt

SEQ ID NO: 1140 - DNA, 17 bp, Homo sapiens
aggtgcctgggcagttt

SEQ ID NO: 1141 - DNA, 17 bp, Homo sapiens
ggtgcctgggcagtttt

SEQ ID NO: 1142 - DNA, 17 bp, Homo sapiens
gtgcctgggcagttttc

SEQ ID NO: 1143 - DNA, 17 bp, Homo sapiens
tgcctgggcagttttcc

SEQ ID NO: 1144 - DNA, 17 bp, Homo sapiens
gcctgggcagttttcca

SEQ ID NO: 1145 - DNA, 17 bp, Homo sapiens
cctgggcagttttccat

SEQ ID NO: 1146 - DNA, 17 bp, Homo sapiens
ctgggcagttttccatc

SEQ ID NO: 1147 - DNA, 17 bp, Homo sapiens
tgggcagttttccatca

SEQ ID NO: 1148 - DNA, 17 bp, Homo sapiens
gggcagttttccatcac

SEQ ID NO: 1149 - DNA, 17 bp, Homo sapiens
ggcagttttccatcaca

SEQ ID NO: 1150 - DNA, 17 bp, Homo sapiens
gcagttttccatcacaa

SEQ ID NO: 1151 - DNA, 17 bp, Homo sapiens
cagttttccatcacaac

SEQ ID NO: 1152 - DNA, 17 bp, Homo sapiens
agttttccatcacaaca

SEQ ID NO: 1153 - DNA, 17 bp, Homo sapiens
gttttccatcacaacag

SEQ ID NO: 1154 - DNA, 17 bp, Homo sapiens
ttttccatcacaacagc

SEQ ID NO: 1155 - DNA, 17 bp, Homo sapiens
tttccatcacaacagcc

SEQ ID NO: 1156 - DNA, 17 bp, Homo sapiens
ttccatcacaacagcct

SEQ ID NO: 1157 - DNA, 17 bp, Homo sapiens
tccatcacaacagcctt

SEQ ID NO: 1158 - DNA, 17 bp, Homo sapiens
ccatcacaacagccttg

SEQ ID NO: 1159 - DNA, 17 bp, Homo sapiens
catcacaacagccttga

SEQ ID NO: 1160 - DNA, 17 bp, Homo sapiens
atcacaacagccttgaa

SEQ ID NO: 1161 - DNA, 17 bp, Homo sapiens
tcacaacagccttgaac

SEQ ID NO: 1162 - DNA, 17 bp, Homo sapiens
cacaacagccttgaaca

SEQ ID NO: 1163 - DNA, 17 bp, Homo sapiens
acaacagccttgaacac

SEQ ID NO: 1164 - DNA, 17 bp, Homo sapiens
caacagccttgaacact

SEQ ID NO: 1165 - DNA, 17 bp, Homo sapiens
aacagccttgaacactc

SEQ ID NO: 1166 - DNA, 17 bp, Homo sapiens
acagccttgaacactct

SEQ ID NO: 1167 - DNA, 17 bp, Homo sapiens
cagccttgaacactctc

SEQ ID NO: 1168 - DNA, 17 bp, Homo sapiens
agccttgaacactctca

SEQ ID NO: 1169 - DNA, 17 bp, Homo sapiens
gccttgaacactctcaa

SEQ ID NO: 1170 - DNA, 17 bp, Homo sapiens
ccttgaacactctcaac

SEQ ID NO: 1171 - DNA, 17 bp, Homo sapiens
cttgaacactctcaacc

SEQ ID NO: 1172 - DNA, 17 bp, Homo sapiens
ttgaacactctcaaccg

SEQ ID NO: 1173 - DNA, 17 bp, Homo sapiens
tgaacactctcaaccgg

SEQ ID NO: 1174 - DNA, 17 bp, Homo sapiens
gaacactctcaaccgga

SEQ ID NO: 1175 - DNA, 17 bp, Homo sapiens
aacactctcaaccggat

SEQ ID NO: 1176 - DNA, 17 bp, Homo sapiens
acactctcaaccggatg

SEQ ID NO: 1177 - DNA, 17 bp, Homo sapiens
cactctcaaccggatgg

SEQ ID NO: 1178 - DNA, 17 bp, Homo sapiens
actctcaaccggatggt

SEQ ID NO: 1179 - DNA, 17 bp, Homo sapiens
ctctcaaccggatggtc

SEQ ID NO: 1180 - DNA, 17 bp, Homo sapiens
tctcaaccggatggtcc

SEQ ID NO: 1181 - DNA, 17 bp, Homo sapiens
ctcaaccggatggtcca

SEQ ID NO: 1182 - DNA, 17 bp, Homo sapiens
tcaaccggatggtccat

SEQ ID NO: 1183 - DNA, 17 bp, Homo sapiens
caaccggatggtccatt

SEQ ID NO: 1184 - DNA, 17 bp, Homo sapiens
aaccggatggtccattc

SEQ ID NO: 1185 - DNA, 17 bp, Homo sapiens
accggatggtccattct

SEQ ID NO: 1186 - DNA, 17 bp, Homo sapiens
ccggatggtccattctc

SEQ ID NO: 1187 - DNA, 17 bp, Homo sapiens
cggatggtccattctcc

SEQ ID NO: 1188 - DNA, 17 bp, Homo sapiens
ggatggtccattctcct

SEQ ID NO: 1189 - DNA, 17 bp, Homo sapiens
gatggtccattctcctt

SEQ ID NO: 1190 - DNA, 17 bp, Homo sapiens
atggtccattctccttc

SEQ ID NO: 1191 - DNA, 17 bp, Homo sapiens
tggtccattctccttca

SEQ ID NO: 1192 - DNA, 17 bp, Homo sapiens
ggtccattctccttcag

SEQ ID NO: 1193 - DNA, 17 bp, Homo sapiens
gtccattctccttcagg

SEQ ID NO: 1194 - DNA, 17 bp, Homo sapiens
tccattctccttcaggg

SEQ ID NO: 1195 - DNA, 17 bp, Homo sapiens
ccattctccttcagggc

SEQ ID NO: 1196 - DNA, 17 bp, Homo sapiens
cattctccttcagggcg

SEQ ID NO: 1197 - DNA, 17 bp, Homo sapiens
attctccttcagggcgc

SEQ ID NO: 1198 - DNA, 17 bp, Homo sapiens
ttctccttcagggcgcc

SEQ ID NO: 1199 - DNA, 17 bp, Homo sapiens
tctccttcagggcgcca

SEQ ID NO: 1200 - DNA, 17 bp, Homo sapiens
ctccttcagggcgccat

SEQ ID NO: 1201 - DNA, 17 bp, Homo sapiens
tccttcagggcgccata

SEQ ID NO: 1202 - DNA, 17 bp, Homo sapiens
ccttcagggcgccatat

SEQ ID NO: 1203 - DNA, 17 bp, Homo sapiens
cttcagggcgccatatg

SEQ ID NO: 1204 - DNA, 17 bp, Homo sapiens
ttcagggcgccatatgg

SEQ ID NO: 1205 - DNA, 17 bp, Homo sapiens
tcagggcgccatatggt

SEQ ID NO: 1206 - DNA, 17 bp, Homo sapiens
cagggcgccatatggta

SEQ ID NO: 1207 - DNA, 17 bp, Homo sapiens
agggcgccatatggtag

SEQ ID NO: 1208 - DNA, 17 bp, Homo sapiens
gggcgccatatggtaga

SEQ ID NO: 1209 - DNA, 17 bp, Homo sapiens
ggcgccatatggtagag

SEQ ID NO: 1210 - DNA, 17 bp, Homo sapiens
gcgccatatggtagaga

SEQ ID NO: 1211 - DNA, 17 bp, Homo sapiens
cgccatatggtagagat

SEQ ID NO: 1212 - DNA, 17 bp, Homo sapiens
gccatatggtagagatc

SEQ ID NO: 1213 - DNA, 17 bp, Homo sapiens
ccatatggtagagatca

SEQ ID NO: 1214 - DNA, 17 bp, Homo sapiens
catatggtagagatcag

SEQ ID NO: 1215 - DNA, 17 bp, Homo sapiens
atatggtagagatcagc

SEQ ID NO: 1216 - DNA, 17 bp, Homo sapiens
tatggtagagatcagca

SEQ ID NO: 1217 - DNA, 17 bp, Homo sapiens
atggtagagatcagcac

SEQ ID NO: 1218 - DNA, 17 bp, Homo sapiens
tggtagagatcagcacc

SEQ ID NO: 1219 - DNA, 17 bp, Homo sapiens
ggtagagatcagcaccc

SEQ ID NO: 1220 - DNA, 17 bp, Homo sapiens
gtagagatcagcacccc

SEQ ID NO: 1221 - DNA, 17 bp, Homo sapiens
tagagatcagcacccca

SEQ ID NO: 1222 - DNA, 17 bp, Homo sapiens
agagatcagcaccccag

SEQ ID NO: 1223 - DNA, 17 bp, Homo sapiens
gagatcagcaccccagt

SEQ ID NO: 1224 - DNA, 17 bp, Homo sapiens
agatcagcaccccagtg

SEQ ID NO: 1225 - DNA, 17 bp, Homo sapiens
gatcagcaccccagtgc

SEQ ID NO: 1226 - DNA, 17 bp, Homo sapiens
atcagcaccccagtgct

SEQ ID NO: 1227 - DNA, 17 bp, Homo sapiens
tcagcaccccagtgctc

SEQ ID NO: 1228 - DNA, 17 bp, Homo sapiens
cagcaccccagtgctca

SEQ ID NO: 1229 - DNA, 17 bp, Homo sapiens
agcaccccagtgctcat

SEQ ID NO: 1230 - DNA, 17 bp, Homo sapiens
gcaccccagtgctcatc

SEQ ID NO: 1231 - DNA, 17 bp, Homo sapiens
caccccagtgctcatca

SEQ ID NO: 1232 - DNA, 17 bp, Homo sapiens
accccagtgctcatcag

SEQ ID NO: 1233 - DNA, 17 bp, Homo sapiens
ccccagtgctcatcagc

SEQ ID NO: 1234 - DNA, 17 bp, Homo sapiens
cccagtgctcatcagct

SEQ ID NO: 1235 - DNA, 17 bp, Homo sapiens
ccagtgctcatcagctc

SEQ ID NO: 1236 - DNA, 17 bp, Homo sapiens
cagtgctcatcagctcc

SEQ ID NO: 1237 - DNA, 17 bp, Homo sapiens
agtgctcatcagctcca

SEQ ID NO: 1238 - DNA, 17 bp, Homo sapiens
gtgctcatcagctccag

SEQ ID NO: 1239 - DNA, 17 bp, Homo sapiens
tgctcatcagctccagc

SEQ ID NO: 1240 - DNA, 17 bp, Homo sapiens
gctcatcagctccagca

SEQ ID NO: 1241 - DNA, 17 bp, Homo sapiens
ctcatcagctccagcaa

SEQ ID NO: 1242 - DNA, 17 bp, Homo sapiens
tcatcagctccagcaac

SEQ ID NO: 1243 - DNA, 17 bp, Homo sapiens
catcagctccagcaacc

SEQ ID NO: 1244 - DNA, 17 bp, Homo sapiens
atcagctccagcaaccc

SEQ ID NO: 1245 - DNA, 17 bp, Homo sapiens
tcagctccagcaacccc

SEQ ID NO: 1246 - DNA, 17 bp, Homo sapiens
cagctccagcaacccct

SEQ ID NO: 1247 - DNA, 17 bp, Homo sapiens
agctccagcaacccctc

SEQ ID NO: 1248 - DNA, 17 bp, Homo sapiens
gctccagcaacccctct

SEQ ID NO: 1249 - DNA, 17 bp, Homo sapiens
ctccagcaacccctctg

SEQ ID NO: 1250 - DNA, 17 bp, Homo sapiens
tccagcaacccctctgt

SEQ ID NO: 1251 - DNA, 17 bp, Homo sapiens
ccagcaacccctctgtg

SEQ ID NO: 1252 - DNA, 17 bp, Homo sapiens
cagcaacccctctgtga

SEQ ID NO: 1253 - DNA, 17 bp, Homo sapiens
agcaacccctctgtgat

SEQ ID NO: 1254 - DNA, 17 bp, Homo sapiens
gcaacccctctgtgatc

SEQ ID NO: 1255 - DNA, 17 bp, Homo sapiens
caacccctctgtgatca

SEQ ID NO: 1256 - DNA, 17 bp, Homo sapiens
aacccctctgtgatcac

SEQ ID NO: 1257 - DNA, 17 bp, Homo sapiens
acccctctgtgatcacc

SEQ ID NO: 1258 - DNA, 17 bp, Homo sapiens
cccctctgtgatcaccc

SEQ ID NO: 1259 - DNA, 17 bp, Homo sapiens
ccctctgtgatcaccca

SEQ ID NO: 1260 - DNA, 17 bp, Homo sapiens
cctctgtgatcacccag

SEQ ID NO: 1261 - DNA, 17 bp, Homo sapiens
ctctgtgatcacccagc

SEQ ID NO: 1262 - DNA, 17 bp, Homo sapiens
tctgtgatcacccagcc

SEQ ID NO: 1263 - DNA, 17 bp, Homo sapiens
ctgtgatcacccagccc

SEQ ID NO: 1264 - DNA, 17 bp, Homo sapiens
tgtgatcacccagccca

SEQ ID NO: 1265 - DNA, 17 bp, Homo sapiens
gtgatcacccagcccat

SEQ ID NO: 1266 - DNA, 17 bp, Homo sapiens
tgatcacccagcccatg

SEQ ID NO: 1267 - DNA, 17 bp, Homo sapiens
gatcacccagcccatgg

SEQ ID NO: 1268 - DNA, 17 bp, Homo sapiens
atcacccagcccatgga

SEQ ID NO: 1269 - DNA, 17 bp, Homo sapiens
tcacccagcccatggag

SEQ ID NO: 1270 - DNA, 17 bp, Homo sapiens
cacccagcccatggaga

SEQ ID NO: 1271 - DNA, 17 bp, Homo sapiens
acccagcccatggagaa

SEQ ID NO: 1272 - DNA, 17 bp, Homo sapiens
cccagcccatggagaaa

SEQ ID NO: 1273 - DNA, 17 bp, Homo sapiens
ccagcccatggagaaag

SEQ ID NO: 1274 - DNA, 17 bp, Homo sapiens
cagcccatggagaaagc

SEQ ID NO: 1275 - DNA, 17 bp, Homo sapiens
agcccatggagaaagca

SEQ ID NO: 1276 - DNA, 17 bp, Homo sapiens
gcccatggagaaagcag

SEQ ID NO: 1277 - DNA, 17 bp, Homo sapiens
cccatggagaaagcaga

SEQ ID NO: 1278 - DNA, 17 bp, Homo sapiens
ccatggagaaagcagac

SEQ ID NO: 1279 - DNA, 17 bp, Homo sapiens
catggagaaagcagacg

SEQ ID NO: 1280 - DNA, 17 bp, Homo sapiens
atggagaaagcagacgt

SEQ ID NO: 1281 - DNA, 17 bp, Homo sapiens
tggagaaagcagacgtt

SEQ ID NO: 1282 - DNA, 17 bp, Homo sapiens
ggagaaagcagacgttc

SEQ ID NO: 1283 - DNA, 17 bp, Homo sapiens
gagaaagcagacgttcc

SEQ ID NO: 1284 - DNA, 17 bp, Homo sapiens
agaaagcagacgttcct

SEQ ID NO: 1285 - DNA, 17 bp, Homo sapiens
gaaagcagacgttcctt

SEQ ID NO: 1286 - DNA, 17 bp, Homo sapiens
aaagcagacgttccttc

SEQ ID NO: 1287 - DNA, 17 bp, Homo sapiens
aagcagacgttccttcc

SEQ ID NO: 1288 - DNA, 17 bp, Homo sapiens
agcagacgttccttcca

SEQ ID NO: 1289 - DNA, 17 bp, Homo sapiens
gcagacgttccttccag

SEQ ID NO: 1290 - DNA, 17 bp, Homo sapiens
cagacgttccttccagc

SEQ ID NO: 1291 - DNA, 17 bp, Homo sapiens
agacgttccttccagct

SEQ ID NO: 1292 - DNA, 17 bp, Homo sapiens
gacgttccttccagctg

SEQ ID NO: 1293 - DNA, 17 bp, Homo sapiens
acgttccttccagctgt

SEQ ID NO: 1294 - DNA, 17 bp, Homo sapiens
cgttccttccagctgtg

SEQ ID NO: 1295 - DNA, 17 bp, Homo sapiens
gttccttccagctgtgt

SEQ ID NO: 1296 - DNA, 17 bp, Homo sapiens
ttccttccagctgtgtg

SEQ ID NO: 1297 - DNA, 17 bp, Homo sapiens
tccttccagctgtgtgg

SEQ ID NO: 1298 - DNA, 17 bp, Homo sapiens
ccttccagctgtgtggg

SEQ ID NO: 1299 - DNA, 17 bp, Homo sapiens
cttccagctgtgtggga

SEQ ID NO: 1300 - DNA, 17 bp, Homo sapiens
ttccagctgtgtgggac

SEQ ID NO: 1301 - DNA, 17 bp, Homo sapiens
tccagctgtgtgggaca

SEQ ID NO: 1302 - DNA, 17 bp, Homo sapiens
ccagctgtgtgggacag

SEQ ID NO: 1303 - DNA, 17 bp, Homo sapiens
cagctgtgtgggacagg

SEQ ID NO: 1304 - DNA, 17 bp, Homo sapiens
agctgtgtgggacaggt

SEQ ID NO: 1305 - DNA, 17 bp, Homo sapiens
gctgtgtgggacaggtc

SEQ ID NO: 1306 - DNA, 17 bp, Homo sapiens
ctgtgtgggacaggtca

SEQ ID NO: 1307 - DNA, 17 bp, Homo sapiens
tgtgtgggacaggtcag

SEQ ID NO: 1308 - DNA, 17 bp, Homo sapiens
gtgtgggacaggtcagc

SEQ ID NO: 1309 - DNA, 17 bp, Homo sapiens
tgtgggacaggtcagca

SEQ ID NO: 1310 - DNA, 17 bp, Homo sapiens
gtgggacaggtcagcac

SEQ ID NO: 1311 - DNA, 17 bp, Homo sapiens
tgggacaggtcagcact

SEQ ID NO: 1312 - DNA, 17 bp, Homo sapiens
gggacaggtcagcactt

SEQ ID NO: 1313 - DNA, 17 bp, Homo sapiens
ggacaggtcagcactta

SEQ ID NO: 1314 - DNA, 17 bp, Homo sapiens
gacaggtcagcacttat

SEQ ID NO: 1315 - DNA, 17 bp, Homo sapiens
acaggtcagcacttatc

SEQ ID NO: 1316 - DNA, 17 bp, Homo sapiens
caggtcagcacttatca

SEQ ID NO: 1317 - DNA, 17 bp, Homo sapiens
aggtcagcacttatcac

SEQ ID NO: 1318 - DNA, 17 bp, Homo sapiens
ggtcagcacttatcacc

SEQ ID NO: 1319 - DNA, 17 bp, Homo sapiens
gtcagcacttatcaccc

SEQ ID NO: 1320 - DNA, 17 bp, Homo sapiens
tcagcacttatcacccc

SEQ ID NO: 1321 - DNA, 17 bp, Homo sapiens
cagcacttatcaccccg

SEQ ID NO: 1322 - DNA, 17 bp, Homo sapiens
agcacttatcaccccgc

SEQ ID NO: 1323 - DNA, 17 bp, Homo sapiens
gcacttatcaccccgca

SEQ ID NO: 1324 - DNA, 17 bp, Homo sapiens
cacttatcaccccgcac

SEQ ID NO: 1325 - DNA, 17 bp, Homo sapiens
acttatcaccccgcacc

SEQ ID NO: 1326 - DNA, 17 bp, Homo sapiens
cttatcaccccgcacct

SEQ ID NO: 1327 - DNA, 17 bp, Homo sapiens
ttatcaccccgcacctg

SEQ ID NO: 1328 - DNA, 17 bp, Homo sapiens
tatcaccccgcacctgt

SEQ ID NO: 1329 - DNA, 17 bp, Homo sapiens
atcaccccgcacctgtc

SEQ ID NO: 1330 - DNA, 17 bp, Homo sapiens
tcaccccgcacctgtct

SEQ ID NO: 1331 - DNA, 17 bp, Homo sapiens
caccccgcacctgtctc

SEQ ID NO: 1332 - DNA, 17 bp, Homo sapiens
accccgcacctgtctct

SEQ ID NO: 1333 - DNA, 17 bp, Homo sapiens
ccccgcacctgtctctc

SEQ ID NO: 1334 - DNA, 17 bp, Homo sapiens
cccgcacctgtctctcc

SEQ ID NO: 1335 - DNA, 17 bp, Homo sapiens
ccgcacctgtctctcca

SEQ ID NO: 1336 - DNA, 17 bp, Homo sapiens
cgcacctgtctctccag

SEQ ID NO: 1337 - DNA, 17 bp, Homo sapiens
gcacctgtctctccagg

SEQ ID NO: 1338 - DNA, 17 bp, Homo sapiens
cacctgtctctccagga

SEQ ID NO: 1339 - DNA, 17 bp, Homo sapiens
acctgtctctccaggac

SEQ ID NO: 1340 - DNA, 17 bp, Homo sapiens
cctgtctctccaggaca

SEQ ID NO: 1341 - DNA, 17 bp, Homo sapiens
ctgtctctccaggacat

SEQ ID NO: 1342 - DNA, 17 bp, Homo sapiens
tgtctctccaggacatt

SEQ ID NO: 1343 - DNA, 17 bp, Homo sapiens
gtctctccaggacattc

SEQ ID NO: 1344 - DNA, 17 bp, Homo sapiens
tctctccaggacattcc

SEQ ID NO: 1345 - DNA, 17 bp, Homo sapiens
ctctccaggacattcca

SEQ ID NO: 1346 - DNA, 17 bp, Homo sapiens
tctccaggacattccac

SEQ ID NO: 1347 - DNA, 17 bp, Homo sapiens
ctccaggacattccaca

SEQ ID NO: 1348 - DNA, 17 bp, Homo sapiens
tccaggacattccacag

SEQ ID NO: 1349 - DNA, 17 bp, Homo sapiens
ccaggacattccacagc

SEQ ID NO: 1350 - DNA, 17 bp, Homo sapiens
caggacattccacagcc

SEQ ID NO: 1351 - DNA, 17 bp, Homo sapiens
aggacattccacagccg

SEQ ID NO: 1352 - DNA, 17 bp, Homo sapiens
ggacattccacagccgt

SEQ ID NO: 1353 - DNA, 17 bp, Homo sapiens
gacattccacagccgtg

SEQ ID NO: 1354 - DNA, 17 bp, Homo sapiens
acattccacagccgtgg

SEQ ID NO: 1355 - DNA, 17 bp, Homo sapiens
cattccacagccgtggt

SEQ ID NO: 1356 - DNA, 17 bp, Homo sapiens
attccacagccgtggtc

SEQ ID NO: 1357 - DNA, 17 bp, Homo sapiens
ttccacagccgtggtca

SEQ ID NO: 1358 - DNA, 17 bp, Homo sapiens
tccacagccgtggtcag

SEQ ID NO: 1359 - DNA, 17 bp, Homo sapiens
ccacagccgtggtcagt

SEQ ID NO: 1360 - DNA, 17 bp, Homo sapiens
cacagccgtggtcagtc

SEQ ID NO: 1361 - DNA, 17 bp, Homo sapiens
acagccgtggtcagtct

SEQ ID NO: 1362 - DNA, 17 bp, Homo sapiens
cagccgtggtcagtctg

SEQ ID NO: 1363 - DNA, 17 bp, Homo sapiens
agccgtggtcagtctgc

SEQ ID NO: 1364 - DNA, 17 bp, Homo sapiens
gccgtggtcagtctgcc

SEQ ID NO: 1365 - DNA, 17 bp, Homo sapiens
ccgtggtcagtctgcct

SEQ ID NO: 1366 - DNA, 17 bp, Homo sapiens
cgtggtcagtctgcctg

SEQ ID NO: 1367 - DNA, 17 bp, Homo sapiens
gtggtcagtctgcctgg

SEQ ID NO: 1368 - DNA, 17 bp, Homo sapiens
tggtcagtctgcctggc

SEQ ID NO: 1369 - DNA, 17 bp, Homo sapiens
ggtcagtctgcctggct

SEQ ID NO: 1370 - DNA, 17 bp, Homo sapiens
gtcagtctgcctggctc

SEQ ID NO: 1371 - DNA, 17 bp, Homo sapiens
tcagtctgcctggctcc

SEQ ID NO: 1372 - DNA, 17 bp, Homo sapiens
cagtctgcctggctccc

SEQ ID NO: 1373 - DNA, 17 bp, Homo sapiens
agtctgcctggctccca

SEQ ID NO: 1374 - DNA, 17 bp, Homo sapiens
gtctgcctggctcccag

SEQ ID NO: 1375 - DNA, 17 bp, Homo sapiens
tctgcctggctcccagc

SEQ ID NO: 1376 - DNA, 17 bp, Homo sapiens
ctgcctggctcccagca

SEQ ID NO: 1377 - DNA, 17 bp, Homo sapiens
tgcctggctcccagcaa

SEQ ID NO: 1378 - DNA, 17 bp, Homo sapiens
gcctggctcccagcaac

SEQ ID NO: 1379 - DNA, 17 bp, Homo sapiens
cctggctcccagcaaca

SEQ ID NO: 1380 - DNA, 17 bp, Homo sapiens
ctggctcccagcaacac

SEQ ID NO: 1381 - DNA, 17 bp, Homo sapiens
tggctcccagcaacacc

SEQ ID NO: 1382 - DNA, 17 bp, Homo sapiens
ggctcccagcaacacct

SEQ ID NO: 1383 - DNA, 17 bp, Homo sapiens
gctcccagcaacacctc

SEQ ID NO: 1384 - DNA, 17 bp, Homo sapiens
ctcccagcaacacctct

SEQ ID NO: 1385 - DNA, 17 bp, Homo sapiens
tcccagcaacacctctc

SEQ ID NO: 1386 - DNA, 17 bp, Homo sapiens
cccagcaacacctctca

SEQ ID NO: 1387 - DNA, 17 bp, Homo sapiens
ccagcaacacctctcag

SEQ ID NO: 1388 - DNA, 17 bp, Homo sapiens
cagcaacacctctcagc

SEQ ID NO: 1389 - DNA, 17 bp, Homo sapiens
agcaacacctctcagcg

SEQ ID NO: 1390 - DNA, 17 bp, Homo sapiens
gcaacacctctcagcga

SEQ ID NO: 1391 - DNA, 17 bp, Homo sapiens
caacacctctcagcgaa

SEQ ID NO: 1392 - DNA, 17 bp, Homo sapiens
aacacctctcagcgaac

SEQ ID NO: 1393 - DNA, 17 bp, Homo sapiens
acacctctcagcgaaca

SEQ ID NO: 1394 - DNA, 17 bp, Homo sapiens
cacctctcagcgaacat

SEQ ID NO: 1395 - DNA, 17 bp, Homo sapiens
acctctcagcgaacatg

SEQ ID NO: 1396 - DNA, 17 bp, Homo sapiens
cctctcagcgaacatgt

SEQ ID NO: 1397 - DNA, 17 bp, Homo sapiens
ctctcagcgaacatgtt

SEQ ID NO: 1398 - DNA, 17 bp, Homo sapiens
tctcagcgaacatgttt

SEQ ID NO: 1399 - DNA, 17 bp, Homo sapiens
ctcagcgaacatgtttg

SEQ ID NO: 1400 - DNA, 17 bp, Homo sapiens
tcagcgaacatgtttgt

SEQ ID NO: 1401 - DNA, 17 bp, Homo sapiens
cagcgaacatgtttgta

SEQ ID NO: 1402 - DNA, 17 bp, Homo sapiens
agcgaacatgtttgtag

SEQ ID NO: 1403 - DNA, 17 bp, Homo sapiens
gcgaacatgtttgtagc

SEQ ID NO: 1404 - DNA, 17 bp, Homo sapiens
cgaacatgtttgtagcc

SEQ ID NO: 1405 - DNA, 17 bp, Homo sapiens
gaacatgtttgtagccc

SEQ ID NO: 1406 - DNA, 17 bp, Homo sapiens
aacatgtttgtagccct

SEQ ID NO: 1407 - DNA, 17 bp, Homo sapiens
acatgtttgtagccctg

SEQ ID NO: 1408 - DNA, 17 bp, Homo sapiens
catgtttgtagccctgc

SEQ ID NO: 1409 - DNA, 17 bp, Homo sapiens
atgtttgtagccctgca

SEQ ID NO: 1410 - DNA, 17 bp, Homo sapiens
tgtttgtagccctgcac

SEQ ID NO: 1411 - DNA, 17 bp, Homo sapiens
gtttgtagccctgcact

SEQ ID NO: 1412 - DNA, 17 bp, Homo sapiens
tttgtagccctgcactc

SEQ ID NO: 1413 - DNA, 17 bp, Homo sapiens
ttgtagccctgcactcc

SEQ ID NO: 1414 - DNA, 17 bp, Homo sapiens
tgtagccctgcactcct

SEQ ID NO: 1415 - DNA, 17 bp, Homo sapiens
gtagccctgcactccta

SEQ ID NO: 1416 - DNA, 17 bp, Homo sapiens
tagccctgcactcctac

SEQ ID NO: 1417 - DNA, 17 bp, Homo sapiens
agccctgcactcctact

SEQ ID NO: 1418 - DNA, 17 bp, Homo sapiens
gccctgcactcctactc

SEQ ID NO: 1419 - DNA, 17 bp, Homo sapiens
ccctgcactcctactca

SEQ ID NO: 1420 - DNA, 17 bp, Homo sapiens
cctgcactcctactcag

SEQ ID NO: 1421 - DNA, 17 bp, Homo sapiens
ctgcactcctactcagc

SEQ ID NO: 1422 - DNA, 17 bp, Homo sapiens
tgcactcctactcagcc

SEQ ID NO: 1423 - DNA, 17 bp, Homo sapiens
gcactcctactcagccc

SEQ ID NO: 1424 - DNA, 17 bp, Homo sapiens
cactcctactcagccca

SEQ ID NO: 1425 - DNA, 17 bp, Homo sapiens
actcctactcagcccat

SEQ ID NO: 1426 - DNA, 17 bp, Homo sapiens
ctcctactcagcccatg

SEQ ID NO: 1427 - DNA, 17 bp, Homo sapiens
tcctactcagcccatgg

SEQ ID NO: 1428 - DNA, 17 bp, Homo sapiens
cctactcagcccatgga

SEQ ID NO: 1429 - DNA, 17 bp, Homo sapiens
ctactcagcccatggac

SEQ ID NO: 1430 - DNA, 17 bp, Homo sapiens
tactcagcccatggacc

SEQ ID NO: 1431 - DNA, 17 bp, Homo sapiens
actcagcccatggaccc

SEQ ID NO: 1432 - DNA, 17 bp, Homo sapiens
ctcagcccatggacccg

SEQ ID NO: 1433 - DNA, 17 bp, Homo sapiens
tcagcccatggacccga

SEQ ID NO: 1434 - DNA, 17 bp, Homo sapiens
cagcccatggacccgat

SEQ ID NO: 1435 - DNA, 17 bp, Homo sapiens
agcccatggacccgatg

SEQ ID NO: 1436 - DNA, 17 bp, Homo sapiens
gcccatggacccgatga

SEQ ID NO: 1437 - DNA, 17 bp, Homo sapiens
cccatggacccgatgag

SEQ ID NO: 1438 - DNA, 17 bp, Homo sapiens
ccatggacccgatgagc

SEQ ID NO: 1439 - DNA, 17 bp, Homo sapiens
catggacccgatgagct

SEQ ID NO: 1440 - DNA, 17 bp, Homo sapiens
atggacccgatgagctg

SEQ ID NO: 1441 - DNA, 17 bp, Homo sapiens
tggacccgatgagctgg

SEQ ID NO: 1442 - DNA, 17 bp, Homo sapiens
ggacccgatgagctgga

SEQ ID NO: 1443 - DNA, 17 bp, Homo sapiens
gacccgatgagctggac

SEQ ID NO: 1444 - DNA, 17 bp, Homo sapiens
acccgatgagctggacc

SEQ ID NO: 1445 - DNA, 17 bp, Homo sapiens
cccgatgagctggacct

SEQ ID NO: 1446 - DNA, 17 bp, Homo sapiens
ccgatgagctggacctg

SEQ ID NO: 1447 - DNA, 17 bp, Homo sapiens
cgatgagctggacctgc

SEQ ID NO: 1448 - DNA, 17 bp, Homo sapiens
gatgagctggacctgca

SEQ ID NO: 1449 - DNA, 17 bp, Homo sapiens
atgagctggacctgcaa

SEQ ID NO: 1450 - DNA, 17 bp, Homo sapiens
tgagctggacctgcaaa

SEQ ID NO: 1451 - DNA, 17 bp, Homo sapiens
gagctggacctgcaaaa

SEQ ID NO: 1452 - DNA, 17 bp, Homo sapiens
agctggacctgcaaaag

SEQ ID NO: 1453 - DNA, 17 bp, Homo sapiens
gctggacctgcaaaagg

SEQ ID NO: 1454 - DNA, 17 bp, Homo sapiens
ctggacctgcaaaaggg

SEQ ID NO: 1455 - DNA, 17 bp, Homo sapiens
tggacctgcaaaaggga

SEQ ID NO: 1456 - DNA, 17 bp, Homo sapiens
ggacctgcaaaagggag

SEQ ID NO: 1457 - DNA, 17 bp, Homo sapiens
gacctgcaaaagggaga

SEQ ID NO: 1458 - DNA, 17 bp, Homo sapiens
acctgcaaaagggagaa

SEQ ID NO: 1459 - DNA, 17 bp, Homo sapiens
cctgcaaaagggagaag

SEQ ID NO: 1460 - DNA, 17 bp, Homo sapiens
ctgcaaaagggagaagg

SEQ ID NO: 1461 - DNA, 17 bp, Homo sapiens
tgcaaaagggagaaggc

SEQ ID NO: 1462 - DNA, 17 bp, Homo sapiens
gcaaaagggagaaggcg

SEQ ID NO: 1463 - DNA, 17 bp, Homo sapiens
caaaagggagaaggcgt

SEQ ID NO: 1464 - DNA, 17 bp, Homo sapiens
aaaagggagaaggcgtc

SEQ ID NO: 1465 - DNA, 17 bp, Homo sapiens
aaagggagaaggcgtca

SEQ ID NO: 1466 - DNA, 17 bp, Homo sapiens
aagggagaaggcgtcag

SEQ ID NO: 1467 - DNA, 17 bp, Homo sapiens
agggagaaggcgtcagg

SEQ ID NO: 1468 - DNA, 17 bp, Homo sapiens
gggagaaggcgtcaggg

SEQ ID NO: 1469 - DNA, 17 bp, Homo sapiens
ggagaaggcgtcagggt

SEQ ID NO: 1470 - DNA, 17 bp, Homo sapiens
gagaaggcgtcagggtc

SEQ ID NO: 1471 - DNA, 17 bp, Homo sapiens
agaaggcgtcagggtcc

SEQ ID NO: 1472 - DNA, 17 bp, Homo sapiens
gaaggcgtcagggtcct

SEQ ID NO: 1473 - DNA, 17 bp, Homo sapiens
aaggcgtcagggtcctg

SEQ ID NO: 1474 - DNA, 17 bp, Homo sapiens
aggcgtcagggtcctgg

SEQ ID NO: 1475 - DNA, 17 bp, Homo sapiens
ggcgtcagggtcctggg

SEQ ID NO: 1476 - DNA, 17 bp, Homo sapiens
gcgtcagggtcctgggg

SEQ ID NO: 1477 - DNA, 17 bp, Homo sapiens
cgtcagggtcctgggga

SEQ ID NO: 1478 - DNA, 17 bp, Homo sapiens
gtcagggtcctggggaa

SEQ ID NO: 1479 - DNA, 17 bp, Homo sapiens
tcagggtcctggggaag

SEQ ID NO: 1480 - DNA, 17 bp, Homo sapiens
cagggtcctggggaagt

SEQ ID NO: 1481 - DNA, 17 bp, Homo sapiens
agggtcctggggaagtg

SEQ ID NO: 1482 - DNA, 17 bp, Homo sapiens
gggtcctggggaagtgc

SEQ ID NO: 1483 - DNA, 17 bp, Homo sapiens
ggtcctggggaagtgcc

SEQ ID NO: 1484 - DNA, 17 bp, Homo sapiens
gtcctggggaagtgcca

SEQ ID NO: 1485 - DNA, 17 bp, Homo sapiens
tcctggggaagtgccag

SEQ ID NO: 1486 - DNA, 17 bp, Homo sapiens
cctggggaagtgccagg

SEQ ID NO: 1487 - DNA, 17 bp, Homo sapiens
ctggggaagtgccagga

SEQ ID NO: 1488 - DNA, 17 bp, Homo sapiens
tggggaagtgccaggac

SEQ ID NO: 1489 - DNA, 17 bp, Homo sapiens
ggggaagtgccaggacg

SEQ ID NO: 1490 - DNA, 17 bp, Homo sapiens
gggaagtgccaggacgg

SEQ ID NO: 1491 - DNA, 17 bp, Homo sapiens
ggaagtgccaggacggc

SEQ ID NO: 1492 - DNA, 17 bp, Homo sapiens
gaagtgccaggacggct

SEQ ID NO: 1493 - DNA, 17 bp, Homo sapiens
aagtgccaggacggctg

SEQ ID NO: 1494 - DNA, 17 bp, Homo sapiens
agtgccaggacggctgg

SEQ ID NO: 1495 - DNA, 17 bp, Homo sapiens
gtgccaggacggctggc

SEQ ID NO: 1496 - DNA, 17 bp, Homo sapiens
tgccaggacggctggct

SEQ ID NO: 1497 - DNA, 17 bp, Homo sapiens
gccaggacggctggctc

SEQ ID NO: 1498 - DNA, 17 bp, Homo sapiens
ccaggacggctggctca

SEQ ID NO: 1499 - DNA, 17 bp, Homo sapiens
caggacggctggctcag

SEQ ID NO: 1500 - DNA, 17 bp, Homo sapiens
aggacggctggctcagg

SEQ ID NO: 1501 - DNA, 17 bp, Homo sapiens
ggacggctggctcaggg

SEQ ID NO: 1502 - DNA, 17 bp, Homo sapiens
gacggctggctcagggg

SEQ ID NO: 1503 - DNA, 17 bp, Homo sapiens
acggctggctcaggggc

SEQ ID NO: 1504 - DNA, 17 bp, Homo sapiens
cggctggctcaggggcg

SEQ ID NO: 1505 - DNA, 17 bp, Homo sapiens
ggctggctcaggggcgt

SEQ ID NO: 1506 - DNA, 17 bp, Homo sapiens
gctggctcaggggcgtc

SEQ ID NO: 1507 - DNA, 17 bp, Homo sapiens
ctggctcaggggcgtct

SEQ ID NO: 1508 - DNA, 17 bp, Homo sapiens
tggctcaggggcgtctc

SEQ ID NO: 1509 - DNA, 17 bp, Homo sapiens
ggctcaggggcgtctcc

SEQ ID NO: 1510 - DNA, 17 bp, Homo sapiens
gctcaggggcgtctcct

SEQ ID NO: 1511 - DNA, 17 bp, Homo sapiens
ctcaggggcgtctcctt

SEQ ID NO: 1512 - DNA, 17 bp, Homo sapiens
tcaggggcgtctccttg

SEQ ID NO: 1513 - DNA, 17 bp, Homo sapiens
caggggcgtctccttgg

SEQ ID NO: 1514 - DNA, 17 bp, Homo sapiens
aggggcgtctccttggt

SEQ ID NO: 1515 - DNA, 17 bp, Homo sapiens
ggggcgtctccttggtc

SEQ ID NO: 1516 - DNA, 17 bp, Homo sapiens
gggcgtctccttggtca

SEQ ID NO: 1517 - DNA, 17 bp, Homo sapiens
ggcgtctccttggtcac

SEQ ID NO: 1518 - DNA, 17 bp, Homo sapiens
gcgtctccttggtcacc

SEQ ID NO: 1519 - DNA, 17 bp, Homo sapiens
cgtctccttggtcaccg

SEQ ID NO: 1520 - DNA, 17 bp, Homo sapiens
gtctccttggtcaccgg

SEQ ID NO: 1521 - DNA, 17 bp, Homo sapiens
tctccttggtcaccggg

SEQ ID NO: 1522 - DNA, 17 bp, Homo sapiens
ctccttggtcaccgggc

SEQ ID NO: 1523 - DNA, 17 bp, Homo sapiens
tccttggtcaccgggcg

SEQ ID NO: 1524 - DNA, 17 bp, Homo sapiens
ccttggtcaccgggcga

SEQ ID NO: 1525 - DNA, 17 bp, Homo sapiens
cttggtcaccgggcgag

SEQ ID NO: 1526 - DNA, 17 bp, Homo sapiens
ttggtcaccgggcgagt

SEQ ID NO: 1527 - DNA, 17 bp, Homo sapiens
tggtcaccgggcgagtc

SEQ ID NO: 1528 - DNA, 17 bp, Homo sapiens
ggtcaccgggcgagtcg

SEQ ID NO: 1529 - DNA, 17 bp, Homo sapiens
gtcaccgggcgagtcgg

SEQ ID NO: 1530 - DNA, 17 bp, Homo sapiens
tcaccgggcgagtcggc

SEQ ID NO: 1531 - DNA, 17 bp, Homo sapiens
caccgggcgagtcggca

SEQ ID NO: 1532 - DNA, 17 bp, Homo sapiens
accgggcgagtcggcat

SEQ ID NO: 1533 - DNA, 17 bp, Homo sapiens
ccgggcgagtcggcatc

SEQ ID NO: 1534 - DNA, 17 bp, Homo sapiens
cgggcgagtcggcatct

SEQ ID NO: 1535 - DNA, 17 bp, Homo sapiens
gggcgagtcggcatctt

SEQ ID NO: 1536 - DNA, 17 bp, Homo sapiens
ggcgagtcggcatcttc

SEQ ID NO: 1537 - DNA, 17 bp, Homo sapiens
gcgagtcggcatcttcc

SEQ ID NO: 1538 - DNA, 17 bp, Homo sapiens
cgagtcggcatcttccc

SEQ ID NO: 1539 - DNA, 17 bp, Homo sapiens
gagtcggcatcttccca

SEQ ID NO: 1540 - DNA, 17 bp, Homo sapiens
agtcggcatcttcccaa

SEQ ID NO: 1541 - DNA, 17 bp, Homo sapiens
gtcggcatcttcccaaa

SEQ ID NO: 1542 - DNA, 17 bp, Homo sapiens
tcggcatcttcccaaac

SEQ ID NO: 1543 - DNA, 17 bp, Homo sapiens
cggcatcttcccaaaca

SEQ ID NO: 1544 - DNA, 17 bp, Homo sapiens
ggcatcttcccaaacaa

SEQ ID NO: 1545 - DNA, 17 bp, Homo sapiens
gcatcttcccaaacaat

SEQ ID NO: 1546 - DNA, 17 bp, Homo sapiens
catcttcccaaacaatt

SEQ ID NO: 1547 - DNA, 17 bp, Homo sapiens
atcttcccaaacaatta

SEQ ID NO: 1548 - DNA, 17 bp, Homo sapiens
tcttcccaaacaattac

SEQ ID NO: 1549 - DNA, 17 bp, Homo sapiens
cttcccaaacaattacg

SEQ ID NO: 1550 - DNA, 17 bp, Homo sapiens
ttcccaaacaattacgt

SEQ ID NO: 1551 - DNA, 17 bp, Homo sapiens
tcccaaacaattacgtc

SEQ ID NO: 1552 - DNA, 17 bp, Homo sapiens
cccaaacaattacgtca

SEQ ID NO: 1553 - DNA, 17 bp, Homo sapiens
ccaaacaattacgtcat

SEQ ID NO: 1554 - DNA, 17 bp, Homo sapiens
caaacaattacgtcatc

SEQ ID NO: 1555 - DNA, 17 bp, Homo sapiens
aaacaattacgtcatcc

SEQ ID NO: 1556 - DNA, 17 bp, Homo sapiens
aacaattacgtcatccc

SEQ ID NO: 1557 - DNA, 17 bp, Homo sapiens
acaattacgtcatcccc

SEQ ID NO: 1558 - DNA, 17 bp, Homo sapiens
caattacgtcatcccca

SEQ ID NO: 1559 - DNA, 17 bp, Homo sapiens
aattacgtcatccccat

SEQ ID NO: 1560 - DNA, 17 bp, Homo sapiens
attacgtcatccccatt

SEQ ID NO: 1561 - DNA, 17 bp, Homo sapiens
ttacgtcatccccattt

SEQ ID NO: 1562 - DNA, 17 bp, Homo sapiens
tacgtcatccccatttt

SEQ ID NO: 1563 - DNA, 17 bp, Homo sapiens
acgtcatccccattttc

SEQ ID NO: 1564 - DNA, 17 bp, Homo sapiens
cgtcatccccattttca

SEQ ID NO: 1565 - DNA, 17 bp, Homo sapiens
gtcatccccattttcag

SEQ ID NO: 1566 - DNA, 17 bp, Homo sapiens
tcatccccattttcaga

SEQ ID NO: 1567 - DNA, 17 bp, Homo sapiens
catccccattttcagaa

SEQ ID NO: 1568 - DNA, 17 bp, Homo sapiens
atccccattttcagaaa

SEQ ID NO: 1569 - DNA, 17 bp, Homo sapiens
tccccattttcagaaag

SEQ ID NO: 1570 - DNA, 17 bp, Homo sapiens
ccccattttcagaaaga

SEQ ID NO: 1571 - DNA, 17 bp, Homo sapiens
cccattttcagaaagac

SEQ ID NO: 1572 - DNA, 17 bp, Homo sapiens
ccattttcagaaagacc

SEQ ID NO: 1573 - DNA, 17 bp, Homo sapiens
cattttcagaaagacct

SEQ ID NO: 1574 - DNA, 17 bp, Homo sapiens
attttcagaaagacctc

SEQ ID NO: 1575 - DNA, 17 bp, Homo sapiens
ttttcagaaagacctct

SEQ ID NO: 1576 - DNA, 17 bp, Homo sapiens
tttcagaaagacctcta

SEQ ID NO: 1577 - DNA, 17 bp, Homo sapiens
ttcagaaagacctctag

SEQ ID NO: 1578 - DNA, 17 bp, Homo sapiens
tcagaaagacctctagt

SEQ ID NO: 1579 - DNA, 17 bp, Homo sapiens
cagaaagacctctagtt

SEQ ID NO: 1580 - DNA, 17 bp, Homo sapiens
agaaagacctctagttt

SEQ ID NO: 1581 - DNA, 17 bp, Homo sapiens
gaaagacctctagtttt

SEQ ID NO: 1582 - DNA, 17 bp, Homo sapiens
aaagacctctagttttc

SEQ ID NO: 1583 - DNA, 17 bp, Homo sapiens
aagacctctagttttcc

SEQ ID NO: 1584 - DNA, 17 bp, Homo sapiens
agacctctagttttcca

SEQ ID NO: 1585 - DNA, 17 bp, Homo sapiens
gacctctagttttccag

SEQ ID NO: 1586 - DNA, 17 bp, Homo sapiens
acctctagttttccaga

SEQ ID NO: 1587 - DNA, 17 bp, Homo sapiens
cctctagttttccagac

SEQ ID NO: 1588 - DNA, 17 bp, Homo sapiens
ctctagttttccagact

SEQ ID NO: 1589 - DNA, 17 bp, Homo sapiens
tctagttttccagactc

SEQ ID NO: 1590 - DNA, 17 bp, Homo sapiens
ctagttttccagactcc

SEQ ID NO: 1591 - DNA, 17 bp, Homo sapiens
tagttttccagactccc

SEQ ID NO: 1592 - DNA, 17 bp, Homo sapiens
agttttccagactcccg

SEQ ID NO: 1593 - DNA, 17 bp, Homo sapiens
gttttccagactcccgg

SEQ ID NO: 1594 - DNA, 17 bp, Homo sapiens
ttttccagactcccgga

SEQ ID NO: 1595 - DNA, 17 bp, Homo sapiens
tttccagactcccggag

SEQ ID NO: 1596 - DNA, 17 bp, Homo sapiens
ttccagactcccggagc

SEQ ID NO: 1597 - DNA, 17 bp, Homo sapiens
tccagactcccggagcc

SEQ ID NO: 1598 - DNA, 17 bp, Homo sapiens
ccagactcccggagccc

SEQ ID NO: 1599 - DNA, 17 bp, Homo sapiens
cagactcccggagccct

SEQ ID NO: 1600 - DNA, 17 bp, Homo sapiens
agactcccggagccctg

SEQ ID NO: 1601 - DNA, 17 bp, Homo sapiens
gactcccggagccctgg

SEQ ID NO: 1602 - DNA, 17 bp, Homo sapiens
actcccggagccctggt

SEQ ID NO: 1603 - DNA, 17 bp, Homo sapiens
ctcccggagccctggtc

SEQ ID NO: 1604 - DNA, 17 bp, Homo sapiens
tcccggagccctggtct

SEQ ID NO: 1605 - DNA, 17 bp, Homo sapiens
cccggagccctggtctc

SEQ ID NO: 1606 - DNA, 17 bp, Homo sapiens
ccggagccctggtctct

SEQ ID NO: 1607 - DNA, 17 bp, Homo sapiens
cggagccctggtctcta

SEQ ID NO: 1608 - DNA, 17 bp, Homo sapiens
ggagccctggtctctac

SEQ ID NO: 1609 - DNA, 17 bp, Homo sapiens
gagccctggtctctaca

SEQ ID NO: 1610 - DNA, 17 bp, Homo sapiens
agccctggtctctacac

SEQ ID NO: 1611 - DNA, 17 bp, Homo sapiens
gccctggtctctacacc

SEQ ID NO: 1612 - DNA, 17 bp, Homo sapiens
ccctggtctctacacca

SEQ ID NO: 1613 - DNA, 17 bp, Homo sapiens
cctggtctctacaccac

SEQ ID NO: 1614 - DNA, 17 bp, Homo sapiens
ctggtctctacaccaca

SEQ ID NO: 1615 - DNA, 17 bp, Homo sapiens
tggtctctacaccacat

SEQ ID NO: 1616 - DNA, 17 bp, Homo sapiens
ggtctctacaccacatg

SEQ ID NO: 1617 - DNA, 17 bp, Homo sapiens
gtctctacaccacatgg

SEQ ID NO: 1618 - DNA, 17 bp, Homo sapiens
tctctacaccacatgga

SEQ ID NO: 1619 - DNA, 17 bp, Homo sapiens
ctctacaccacatggac

SEQ ID NO: 1620 - DNA, 17 bp, Homo sapiens
tctacaccacatggacg

SEQ ID NO: 1621 - DNA, 17 bp, Homo sapiens
ctacaccacatggacgt

SEQ ID NO: 1622 - DNA, 17 bp, Homo sapiens
tacaccacatggacgtt

SEQ ID NO: 1623 - DNA, 17 bp, Homo sapiens
acaccacatggacgtta

SEQ ID NO: 1624 - DNA, 17 bp, Homo sapiens
caccacatggacgttat

SEQ ID NO: 1625 - DNA, 17 bp, Homo sapiens
accacatggacgttatc

SEQ ID NO: 1626 - DNA, 17 bp, Homo sapiens
ccacatggacgttatcc

SEQ ID NO: 1627 - DNA, 17 bp, Homo sapiens
cacatggacgttatcca

SEQ ID NO: 1628 - DNA, 17 bp, Homo sapiens
acatggacgttatccac

SEQ ID NO: 1629 - DNA, 17 bp, Homo sapiens
catggacgttatccacc

SEQ ID NO: 1630 - DNA, 17 bp, Homo sapiens
atggacgttatccacct

SEQ ID NO: 1631 - DNA, 17 bp, Homo sapiens
tggacgttatccacctc

SEQ ID NO: 1632 - DNA, 17 bp, Homo sapiens
ggacgttatccacctcc

SEQ ID NO: 1633 - DNA, 17 bp, Homo sapiens
gacgttatccacctcct

SEQ ID NO: 1634 - DNA, 17 bp, Homo sapiens
acgttatccacctcctc

SEQ ID NO: 1635 - DNA, 17 bp, Homo sapiens
cgttatccacctcctct

SEQ ID NO: 1636 - DNA, 17 bp, Homo sapiens
gttatccacctcctctg

SEQ ID NO: 1637 - DNA, 17 bp, Homo sapiens
ttatccacctcctctgt

SEQ ID NO: 1638 - DNA, 17 bp, Homo sapiens
tatccacctcctctgtg

SEQ ID NO: 1639 - DNA, 17 bp, Homo sapiens
atccacctcctctgtgt

SEQ ID NO: 1640 - DNA, 17 bp, Homo sapiens
tccacctcctctgtgtc

SEQ ID NO: 1641 - DNA, 17 bp, Homo sapiens
ccacctcctctgtgtcc

SEQ ID NO: 1642 - DNA, 17 bp, Homo sapiens
cacctcctctgtgtcct

SEQ ID NO: 1643 - DNA, 17 bp, Homo sapiens
acctcctctgtgtcctc

SEQ ID NO: 1644 - DNA, 17 bp, Homo sapiens
cctcctctgtgtcctcc

SEQ ID NO: 1645 - DNA, 17 bp, Homo sapiens
ctcctctgtgtcctccc

SEQ ID NO: 1646 - DNA, 17 bp, Homo sapiens
tcctctgtgtcctccca

SEQ ID NO: 1647 - DNA, 17 bp, Homo sapiens
cctctgtgtcctcccaa

SEQ ID NO: 1648 - DNA, 17 bp, Homo sapiens
ctctgtgtcctcccaag

SEQ ID NO: 1649 - DNA, 17 bp, Homo sapiens
tctgtgtcctcccaagg

SEQ ID NO: 1650 - DNA, 17 bp, Homo sapiens
ctgtgtcctcccaaggc

SEQ ID NO: 1651 - DNA, 17 bp, Homo sapiens
tgtgtcctcccaaggca

SEQ ID NO: 1652 - DNA, 17 bp, Homo sapiens
gtgtcctcccaaggcag

SEQ ID NO: 1653 - DNA, 17 bp, Homo sapiens
tgtcctcccaaggcagc

SEQ ID NO: 1654 - DNA, 17 bp, Homo sapiens
gtcctcccaaggcagca

SEQ ID NO: 1655 - DNA, 17 bp, Homo sapiens
tcctcccaaggcagcat

SEQ ID NO: 1656 - DNA, 17 bp, Homo sapiens
cctcccaaggcagcatt

SEQ ID NO: 1657 - DNA, 17 bp, Homo sapiens
ctcccaaggcagcattt

SEQ ID NO: 1658 - DNA, 17 bp, Homo sapiens
tcccaaggcagcatttc

SEQ ID NO: 1659 - DNA, 17 bp, Homo sapiens
cccaaggcagcatttca

SEQ ID NO: 1660 - DNA, 17 bp, Homo sapiens
ccaaggcagcatttcag

SEQ ID NO: 1661 - DNA, 17 bp, Homo sapiens
caaggcagcatttcaga

SEQ ID NO: 1662 - DNA, 17 bp, Homo sapiens
aaggcagcatttcagaa

SEQ ID NO: 1663 - DNA, 17 bp, Homo sapiens
aggcagcatttcagaag

SEQ ID NO: 1664 - DNA, 17 bp, Homo sapiens
ggcagcatttcagaagg

SEQ ID NO: 1665 - DNA, 17 bp, Homo sapiens
gcagcatttcagaaggt

SEQ ID NO: 1666 - DNA, 17 bp, Homo sapiens
cagcatttcagaaggtg

SEQ ID NO: 1667 - DNA, 17 bp, Homo sapiens
agcatttcagaaggtga

SEQ ID NO: 1668 - DNA, 17 bp, Homo sapiens
gcatttcagaaggtgat

SEQ ID NO: 1669 - DNA, 17 bp, Homo sapiens
catttcagaaggtgatc

SEQ ID NO: 1670 - DNA, 17 bp, Homo sapiens
atttcagaaggtgatcc

SEQ ID NO: 1671 - DNA, 17 bp, Homo sapiens
tttcagaaggtgatcca

SEQ ID NO: 1672 - DNA, 17 bp, Homo sapiens
ttcagaaggtgatccac

SEQ ID NO: 1673 - DNA, 17 bp, Homo sapiens
tcagaaggtgatccacg

SEQ ID NO: 1674 - DNA, 17 bp, Homo sapiens
cagaaggtgatccacgg

SEQ ID NO: 1675 - DNA, 17 bp, Homo sapiens
agaaggtgatccacggc

SEQ ID NO: 1676 - DNA, 17 bp, Homo sapiens
gaaggtgatccacggca

SEQ ID NO: 1677 - DNA, 17 bp, Homo sapiens
aaggtgatccacggcaa

SEQ ID NO: 1678 - DNA, 17 bp, Homo sapiens
aggtgatccacggcaaa

SEQ ID NO: 1679 - DNA, 17 bp, Homo sapiens
ggtgatccacggcaaag

SEQ ID NO: 1680 - DNA, 17 bp, Homo sapiens
gtgatccacggcaaagc

SEQ ID NO: 1681 - DNA, 17 bp, Homo sapiens
tgatccacggcaaagcc

SEQ ID NO: 1682 - DNA, 17 bp, Homo sapiens
gatccacggcaaagccg

SEQ ID NO: 1683 - DNA, 17 bp, Homo sapiens
atccacggcaaagccgt

SEQ ID NO: 1684 - DNA, 17 bp, Homo sapiens
tccacggcaaagccgtc

SEQ ID NO: 1685 - DNA, 17 bp, Homo sapiens
ccacggcaaagccgtcc

SEQ ID NO: 1686 - DNA, 17 bp, Homo sapiens
cacggcaaagccgtccc

SEQ ID NO: 1687 - DNA, 17 bp, Homo sapiens
acggcaaagccgtccct

SEQ ID NO: 1688 - DNA, 17 bp, Homo sapiens
cggcaaagccgtccctt

SEQ ID NO: 1689 - DNA, 17 bp, Homo sapiens
ggcaaagccgtcccttc

SEQ ID NO: 1690 - DNA, 17 bp, Homo sapiens
gcaaagccgtcccttca

SEQ ID NO: 1691 - DNA, 17 bp, Homo sapiens
caaagccgtcccttcaa

SEQ ID NO: 1692 - DNA, 17 bp, Homo sapiens
aaagccgtcccttcaaa

SEQ ID NO: 1693 - DNA, 17 bp, Homo sapiens
aagccgtcccttcaaat

SEQ ID NO: 1694 - DNA, 17 bp, Homo sapiens
agccgtcccttcaaatc

SEQ ID NO: 1695 - DNA, 17 bp, Homo sapiens
gccgtcccttcaaatcc

SEQ ID NO: 1696 - DNA, 17 bp, Homo sapiens
ccgtcccttcaaatccg

SEQ ID NO: 1697 - DNA, 17 bp, Homo sapiens
cgtcccttcaaatccgt

SEQ ID NO: 1698 - DNA, 17 bp, Homo sapiens
gtcccttcaaatccgtc

SEQ ID NO: 1699 - DNA, 17 bp, Homo sapiens
tcccttcaaatccgtct

SEQ ID NO: 1700 - DNA, 17 bp, Homo sapiens
cccttcaaatccgtctt

SEQ ID NO: 1701 - DNA, 17 bp, Homo sapiens
ccttcaaatccgtcttt

SEQ ID NO: 1702 - DNA, 17 bp, Homo sapiens
cttcaaatccgtctttg

SEQ ID NO: 1703 - DNA, 17 bp, Homo sapiens
ttcaaatccgtctttgt

SEQ ID NO: 1704 - DNA, 17 bp, Homo sapiens
tcaaatccgtctttgtg

SEQ ID NO: 1705 - DNA, 17 bp, Homo sapiens
caaatccgtctttgtgc

SEQ ID NO: 1706 - DNA, 17 bp, Homo sapiens
aaatccgtctttgtgcc

SEQ ID NO: 1707 - DNA, 17 bp, Homo sapiens
aatccgtctttgtgccc

SEQ ID NO: 1708 - DNA, 17 bp, Homo sapiens
atccgtctttgtgccca

SEQ ID NO: 1709 - DNA, 17 bp, Homo sapiens
tccgtctttgtgcccac

SEQ ID NO: 1710 - DNA, 17 bp, Homo sapiens
ccgtctttgtgcccact

SEQ ID NO: 1711 - DNA, 17 bp, Homo sapiens
cgtctttgtgcccactg

SEQ ID NO: 1712 - DNA, 17 bp, Homo sapiens
gtctttgtgcccactgc

SEQ ID NO: 1713 - DNA, 17 bp, Homo sapiens
tctttgtgcccactgcc

SEQ ID NO: 1714 - DNA, 17 bp, Homo sapiens
ctttgtgcccactgcca

SEQ ID NO: 1715 - DNA, 17 bp, Homo sapiens
tttgtgcccactgccat

SEQ ID NO: 1716 - DNA, 17 bp, Homo sapiens
ttgtgcccactgccata

SEQ ID NO: 1717 - DNA, 17 bp, Homo sapiens
tgtgcccactgccatag

SEQ ID NO: 1718 - DNA, 17 bp, Homo sapiens
gtgcccactgccatagt

SEQ ID NO: 1719 - DNA, 17 bp, Homo sapiens
tgcccactgccatagtc

SEQ ID NO: 1720 - DNA, 17 bp, Homo sapiens
gcccactgccatagtca

SEQ ID NO: 1721 - DNA, 17 bp, Homo sapiens
cccactgccatagtcaa

SEQ ID NO: 1722 - DNA, 17 bp, Homo sapiens
ccactgccatagtcaac

SEQ ID NO: 1723 - DNA, 17 bp, Homo sapiens
cactgccatagtcaacc

SEQ ID NO: 1724 - DNA, 17 bp, Homo sapiens
actgccatagtcaaccc

SEQ ID NO: 1725 - DNA, 17 bp, Homo sapiens
ctgccatagtcaacccc

SEQ ID NO: 1726 - DNA, 17 bp, Homo sapiens
tgccatagtcaaccccg

SEQ ID NO: 1727 - DNA, 17 bp, Homo sapiens
gccatagtcaaccccgt

SEQ ID NO: 1728 - DNA, 17 bp, Homo sapiens
ccatagtcaaccccgtg

SEQ ID NO: 1729 - DNA, 17 bp, Homo sapiens
catagtcaaccccgtga

SEQ ID NO: 1730 - DNA, 17 bp, Homo sapiens
atagtcaaccccgtgag

SEQ ID NO: 1731 - DNA, 17 bp, Homo sapiens
tagtcaaccccgtgaga

SEQ ID NO: 1732 - DNA, 17 bp, Homo sapiens
agtcaaccccgtgagaa

SEQ ID NO: 1733 - DNA, 17 bp, Homo sapiens
gtcaaccccgtgagaag

SEQ ID NO: 1734 - DNA, 17 bp, Homo sapiens
tcaaccccgtgagaagc

SEQ ID NO: 1735 - DNA, 17 bp, Homo sapiens
caaccccgtgagaagca

SEQ ID NO: 1736 - DNA, 17 bp, Homo sapiens
aaccccgtgagaagcac

SEQ ID NO: 1737 - DNA, 17 bp, Homo sapiens
accccgtgagaagcaca

SEQ ID NO: 1738 - DNA, 17 bp, Homo sapiens
ccccgtgagaagcacag

SEQ ID NO: 1739 - DNA, 17 bp, Homo sapiens
cccgtgagaagcacagc

SEQ ID NO: 1740 - DNA, 17 bp, Homo sapiens
ccgtgagaagcacagcc

SEQ ID NO: 1741 - DNA, 17 bp, Homo sapiens
cgtgagaagcacagccg

SEQ ID NO: 1742 - DNA, 17 bp, Homo sapiens
gtgagaagcacagccgg

SEQ ID NO: 1743 - DNA, 17 bp, Homo sapiens
tgagaagcacagccggc

SEQ ID NO: 1744 - DNA, 17 bp, Homo sapiens
gagaagcacagccggcc

SEQ ID NO: 1745 - DNA, 17 bp, Homo sapiens
agaagcacagccggccc

SEQ ID NO: 1746 - DNA, 17 bp, Homo sapiens
gaagcacagccggccct

SEQ ID NO: 1747 - DNA, 17 bp, Homo sapiens
aagcacagccggccctg

SEQ ID NO: 1748 - DNA, 17 bp, Homo sapiens
agcacagccggccctgg

SEQ ID NO: 1749 - DNA, 17 bp, Homo sapiens
gcacagccggccctggg

SEQ ID NO: 1750 - DNA, 17 bp, Homo sapiens
cacagccggccctggga

SEQ ID NO: 1751 - DNA, 17 bp, Homo sapiens
acagccggccctgggac

SEQ ID NO: 1752 - DNA, 17 bp, Homo sapiens
cagccggccctgggact

SEQ ID NO: 1753 - DNA, 17 bp, Homo sapiens
agccggccctgggactt

SEQ ID NO: 1754 - DNA, 17 bp, Homo sapiens
gccggccctgggacttt

SEQ ID NO: 1755 - DNA, 17 bp, Homo sapiens
ccggccctgggacttta

SEQ ID NO: 1756 - DNA, 17 bp, Homo sapiens
cggccctgggactttag

SEQ ID NO: 1757 - DNA, 17 bp, Homo sapiens
ggccctgggactttagg

SEQ ID NO: 1758 - DNA, 17 bp, Homo sapiens
gccctgggactttagga

SEQ ID NO: 1759 - DNA, 17 bp, Homo sapiens
ccctgggactttaggac

SEQ ID NO: 1760 - DNA, 17 bp, Homo sapiens
cctgggactttaggaca

SEQ ID NO: 1761 - DNA, 17 bp, Homo sapiens
ctgggactttaggacaa

SEQ ID NO: 1762 - DNA, 17 bp, Homo sapiens
tgggactttaggacaag

SEQ ID NO: 1763 - DNA, 17 bp, Homo sapiens
gggactttaggacaagg

SEQ ID NO: 1764 - DNA, 17 bp, Homo sapiens
ggactttaggacaaggg

SEQ ID NO: 1765 - DNA, 17 bp, Homo sapiens
gactttaggacaagggt

SEQ ID NO: 1766 - DNA, 17 bp, Homo sapiens
actttaggacaagggtc

SEQ ID NO: 1767 - DNA, 17 bp, Homo sapiens
ctttaggacaagggtct

SEQ ID NO: 1768 - DNA, 17 bp, Homo sapiens
tttaggacaagggtctc

SEQ ID NO: 1769 - DNA, 17 bp, Homo sapiens
ttaggacaagggtctct

SEQ ID NO: 1770 - DNA, 17 bp, Homo sapiens
taggacaagggtctctt

SEQ ID NO: 1771 - DNA, 17 bp, Homo sapiens
aggacaagggtctcttc

SEQ ID NO: 1772 - DNA, 17 bp, Homo sapiens
ggacaagggtctcttcg

SEQ ID NO: 1773 - DNA, 17 bp, Homo sapiens
gacaagggtctcttcgg

SEQ ID NO: 1774 - DNA, 17 bp, Homo sapiens
acaagggtctcttcgga

SEQ ID NO: 1775 - DNA, 17 bp, Homo sapiens
caagggtctcttcggaa

SEQ ID NO: 1776 - DNA, 17 bp, Homo sapiens
aagggtctcttcggaaa

SEQ ID NO: 1777 - DNA, 17 bp, Homo sapiens
agggtctcttcggaaag

SEQ ID NO: 1778 - DNA, 17 bp, Homo sapiens
gggtctcttcggaaagg

SEQ ID NO: 1779 - DNA, 17 bp, Homo sapiens
ggtctcttcggaaaggg

SEQ ID NO: 1780 - DNA, 17 bp, Homo sapiens
gtctcttcggaaagggc

SEQ ID NO: 1781 - DNA, 17 bp, Homo sapiens
tctcttcggaaagggcg

SEQ ID NO: 1782 - DNA, 17 bp, Homo sapiens
ctcttcggaaagggcgg

SEQ ID NO: 1783 - DNA, 17 bp, Homo sapiens
tcttcggaaagggcgga

SEQ ID NO: 1784 - DNA, 17 bp, Homo sapiens
cttcggaaagggcggag

SEQ ID NO: 1785 - DNA, 17 bp, Homo sapiens
ttcggaaagggcggagc

SEQ ID NO: 1786 - DNA, 17 bp, Homo sapiens
tcggaaagggcggagca

SEQ ID NO: 1787 - DNA, 17 bp, Homo sapiens
cggaaagggcggagcag

SEQ ID NO: 1788 - DNA, 17 bp, Homo sapiens
ggaaagggcggagcagc

SEQ ID NO: 1789 - DNA, 17 bp, Homo sapiens
gaaagggcggagcagca

SEQ ID NO: 1790 - DNA, 17 bp, Homo sapiens
aaagggcggagcagcat

SEQ ID NO: 1791 - DNA, 17 bp, Homo sapiens
aagggcggagcagcatg

SEQ ID NO: 1792 - DNA, 17 bp, Homo sapiens
agggcggagcagcatga

SEQ ID NO: 1793 - DNA, 17 bp, Homo sapiens
gggcggagcagcatgag

SEQ ID NO: 1794 - DNA, 17 bp, Homo sapiens
ggcggagcagcatgaga

SEQ ID NO: 1795 - DNA, 17 bp, Homo sapiens
gcggagcagcatgagaa

SEQ ID NO: 1796 - DNA, 17 bp, Homo sapiens
cggagcagcatgagaaa

SEQ ID NO: 1797 - DNA, 17 bp, Homo sapiens
ggagcagcatgagaaag

SEQ ID NO: 1798 - DNA, 17 bp, Homo sapiens
gagcagcatgagaaaga

SEQ ID NO: 1799 - DNA, 17 bp, Homo sapiens
agcagcatgagaaagaa

SEQ ID NO: 1800 - DNA, 17 bp, Homo sapiens
gcagcatgagaaagaat

SEQ ID NO: 1801 - DNA, 17 bp, Homo sapiens
cagcatgagaaagaatg

SEQ ID NO: 1802 - DNA, 17 bp, Homo sapiens
agcatgagaaagaatgg

SEQ ID NO: 1803 - DNA, 17 bp, Homo sapiens
gcatgagaaagaatgga

SEQ ID NO: 1804 - DNA, 17 bp, Homo sapiens
catgagaaagaatggat

SEQ ID NO: 1805 - DNA, 17 bp, Homo sapiens
atgagaaagaatggatc

SEQ ID NO: 1806 - DNA, 17 bp, Homo sapiens
tgagaaagaatggatcc

SEQ ID NO: 1807 - DNA, 17 bp, Homo sapiens
gagaaagaatggatccc

SEQ ID NO: 1808 - DNA, 17 bp, Homo sapiens
agaaagaatggatccct

SEQ ID NO: 1809 - DNA, 17 bp, Homo sapiens
gaaagaatggatccctg

SEQ ID NO: 1810 - DNA, 17 bp, Homo sapiens
aaagaatggatccctgc

SEQ ID NO: 1811 - DNA, 17 bp, Homo sapiens
aagaatggatccctgca

SEQ ID NO: 1812 - DNA, 17 bp, Homo sapiens
agaatggatccctgcag

SEQ ID NO: 1813 - DNA, 17 bp, Homo sapiens
gaatggatccctgcaga

SEQ ID NO: 1814 - DNA, 17 bp, Homo sapiens
aatggatccctgcagag

SEQ ID NO: 1815 - DNA, 17 bp, Homo sapiens
atggatccctgcagaga

SEQ ID NO: 1816 - DNA, 17 bp, Homo sapiens
tggatccctgcagagac

SEQ ID NO: 1817 - DNA, 17 bp, Homo sapiens
ggatccctgcagagacc

SEQ ID NO: 1818 - DNA, 17 bp, Homo sapiens
gatccctgcagagaccc

SEQ ID NO: 1819 - DNA, 17 bp, Homo sapiens
atccctgcagagacccc

SEQ ID NO: 1820 - DNA, 17 bp, Homo sapiens
tccctgcagagacccct

SEQ ID NO: 1821 - DNA, 17 bp, Homo sapiens
ccctgcagagacccctc

SEQ ID NO: 1822 - DNA, 17 bp, Homo sapiens
cctgcagagacccctcc

SEQ ID NO: 1823 - DNA, 17 bp, Homo sapiens
ctgcagagacccctcca

SEQ ID NO: 1824 - DNA, 17 bp, Homo sapiens
tgcagagacccctccag

SEQ ID NO: 1825 - DNA, 17 bp, Homo sapiens
gcagagacccctccagt

SEQ ID NO: 1826 - DNA, 17 bp, Homo sapiens
cagagacccctccagtc

SEQ ID NO: 1827 - DNA, 17 bp, Homo sapiens
agagacccctccagtcc

SEQ ID NO: 1828 - DNA, 17 bp, Homo sapiens
gagacccctccagtccg

SEQ ID NO: 1829 - DNA, 17 bp, Homo sapiens
agacccctccagtccgg

SEQ ID NO: 1830 - DNA, 17 bp, Homo sapiens
gacccctccagtccggg

SEQ ID NO: 1831 - DNA, 17 bp, Homo sapiens
acccctccagtccggga

SEQ ID NO: 1832 - DNA, 17 bp, Homo sapiens
cccctccagtccgggat

SEQ ID NO: 1833 - DNA, 17 bp, Homo sapiens
ccctccagtccgggatc

SEQ ID NO: 1834 - DNA, 17 bp, Homo sapiens
cctccagtccgggatcc

SEQ ID NO: 1835 - DNA, 17 bp, Homo sapiens
ctccagtccgggatccc

SEQ ID NO: 1836 - DNA, 17 bp, Homo sapiens
tccagtccgggatcccc

SEQ ID NO: 1837 - DNA, 17 bp, Homo sapiens
ccagtccgggatcccca

SEQ ID NO: 1838 - DNA, 17 bp, Homo sapiens
cagtccgggatccccac

SEQ ID NO: 1839 - DNA, 17 bp, Homo sapiens
agtccgggatccccact

SEQ ID NO: 1840 - DNA, 17 bp, Homo sapiens
gtccgggatccccactc

SEQ ID NO: 1841 - DNA, 17 bp, Homo sapiens
tccgggatccccactct

SEQ ID NO: 1842 - DNA, 17 bp, Homo sapiens
ccgggatccccactctc

SEQ ID NO: 1843 - DNA, 17 bp, Homo sapiens
cgggatccccactctcg

SEQ ID NO: 1844 - DNA, 17 bp, Homo sapiens
gggatccccactctcgt

SEQ ID NO: 1845 - DNA, 17 bp, Homo sapiens
ggatccccactctcgtg

SEQ ID NO: 1846 - DNA, 17 bp, Homo sapiens
gatccccactctcgtgg

SEQ ID NO: 1847 - DNA, 17 bp, Homo sapiens
atccccactctcgtggt

SEQ ID NO: 1848 - DNA, 17 bp, Homo sapiens
tccccactctcgtggta

SEQ ID NO: 1849 - DNA, 17 bp, Homo sapiens
ccccactctcgtggtag

SEQ ID NO: 1850 - DNA, 17 bp, Homo sapiens
cccactctcgtggtagg

SEQ ID NO: 1851 - DNA, 17 bp, Homo sapiens
ccactctcgtggtaggc

SEQ ID NO: 1852 - DNA, 17 bp, Homo sapiens
cactctcgtggtaggct

SEQ ID NO: 1853 - DNA, 17 bp, Homo sapiens
actctcgtggtaggctc

SEQ ID NO: 1854 - DNA, 17 bp, Homo sapiens
ctctcgtggtaggctcc

SEQ ID NO: 1855 - DNA, 17 bp, Homo sapiens
tctcgtggtaggctccc

SEQ ID NO: 1856 - DNA, 17 bp, Homo sapiens
ctcgtggtaggctccct

SEQ ID NO: 1857 - DNA, 17 bp, Homo sapiens
tcgtggtaggctccctc

SEQ ID NO: 1858 - DNA, 17 bp, Homo sapiens
cgtggtaggctccctca

SEQ ID NO: 1859 - DNA, 17 bp, Homo sapiens
gtggtaggctccctcag

SEQ ID NO: 1860 - DNA, 17 bp, Homo sapiens
tggtaggctccctcaga

SEQ ID NO: 1861 - DNA, 17 bp, Homo sapiens
ggtaggctccctcagac

SEQ ID NO: 1862 - DNA, 17 bp, Homo sapiens
gtaggctccctcagacg

SEQ ID NO: 1863 - DNA, 17 bp, Homo sapiens
taggctccctcagacgc

SEQ ID NO: 1864 - DNA, 17 bp, Homo sapiens
aggctccctcagacgca

SEQ ID NO: 1865 - DNA, 17 bp, Homo sapiens
ggctccctcagacgcag

SEQ ID NO: 1866 - DNA, 17 bp, Homo sapiens
gctccctcagacgcagc

SEQ ID NO: 1867 - DNA, 17 bp, Homo sapiens
ctccctcagacgcagcc

SEQ ID NO: 1868 - DNA, 17 bp, Homo sapiens
tccctcagacgcagccc

SEQ ID NO: 1869 - DNA, 17 bp, Homo sapiens
ccctcagacgcagcccc

SEQ ID NO: 1870 - DNA, 17 bp, Homo sapiens
cctcagacgcagcccca

SEQ ID NO: 1871 - DNA, 17 bp, Homo sapiens
ctcagacgcagccccac

SEQ ID NO: 1872 - DNA, 17 bp, Homo sapiens
tcagacgcagccccacc

SEQ ID NO: 1873 - DNA, 17 bp, Homo sapiens
cagacgcagccccacca

SEQ ID NO: 1874 - DNA, 17 bp, Homo sapiens
agacgcagccccaccat

SEQ ID NO: 1875 - DNA, 17 bp, Homo sapiens
gacgcagccccaccatg

SEQ ID NO: 1876 - DNA, 17 bp, Homo sapiens
acgcagccccaccatgg

SEQ ID NO: 1877 - DNA, 17 bp, Homo sapiens
cgcagccccaccatggt

SEQ ID NO: 1878 - DNA, 17 bp, Homo sapiens
gcagccccaccatggtc

SEQ ID NO: 1879 - DNA, 17 bp, Homo sapiens
cagccccaccatggtcc

SEQ ID NO: 1880 - DNA, 17 bp, Homo sapiens
agccccaccatggtcct

SEQ ID NO: 1881 - DNA, 17 bp, Homo sapiens
gccccaccatggtcctt

SEQ ID NO: 1882 - DNA, 17 bp, Homo sapiens
ccccaccatggtccttc

SEQ ID NO: 1883 - DNA, 17 bp, Homo sapiens
cccaccatggtccttcg

SEQ ID NO: 1884 - DNA, 17 bp, Homo sapiens
ccaccatggtccttcgg

SEQ ID NO: 1885 - DNA, 17 bp, Homo sapiens
caccatggtccttcggc

SEQ ID NO: 1886 - DNA, 17 bp, Homo sapiens
accatggtccttcggcc

SEQ ID NO: 1887 - DNA, 17 bp, Homo sapiens
ccatggtccttcggcct

SEQ ID NO: 1888 - DNA, 17 bp, Homo sapiens
catggtccttcggcctc

SEQ ID NO: 1889 - DNA, 17 bp, Homo sapiens
atggtccttcggcctca

SEQ ID NO: 1890 - DNA, 17 bp, Homo sapiens
tggtccttcggcctcag

SEQ ID NO: 1891 - DNA, 17 bp, Homo sapiens
ggtccttcggcctcagc

SEQ ID NO: 1892 - DNA, 17 bp, Homo sapiens
gtccttcggcctcagca

SEQ ID NO: 1893 - DNA, 17 bp, Homo sapiens
tccttcggcctcagcag

SEQ ID NO: 1894 - DNA, 17 bp, Homo sapiens
ccttcggcctcagcagt

SEQ ID NO: 1895 - DNA, 17 bp, Homo sapiens
cttcggcctcagcagtt

SEQ ID NO: 1896 - DNA, 17 bp, Homo sapiens
ttcggcctcagcagttc

SEQ ID NO: 1897 - DNA, 17 bp, Homo sapiens
tcggcctcagcagttcc

SEQ ID NO: 1898 - DNA, 17 bp, Homo sapiens
cggcctcagcagttcca

SEQ ID NO: 1899 - DNA, 17 bp, Homo sapiens
ggcctcagcagttccaa

SEQ ID NO: 1900 - DNA, 17 bp, Homo sapiens
gcctcagcagttccaat

SEQ ID NO: 1901 - DNA, 17 bp, Homo sapiens
cctcagcagttccaatt

SEQ ID NO: 1902 - DNA, 17 bp, Homo sapiens
ctcagcagttccaattc

SEQ ID NO: 1903 - DNA, 17 bp, Homo sapiens
tcagcagttccaattct

SEQ ID NO: 1904 - DNA, 17 bp, Homo sapiens
cagcagttccaattcta

SEQ ID NO: 1905 - DNA, 17 bp, Homo sapiens
agcagttccaattctac

SEQ ID NO: 1906 - DNA, 17 bp, Homo sapiens
gcagttccaattctacc

SEQ ID NO: 1907 - DNA, 17 bp, Homo sapiens
cagttccaattctacca

SEQ ID NO: 1908 - DNA, 17 bp, Homo sapiens
agttccaattctaccag

SEQ ID NO: 1909 - DNA, 17 bp, Homo sapiens
gttccaattctaccagc

SEQ ID NO: 1910 - DNA, 17 bp, Homo sapiens
ttccaattctaccagcc

SEQ ID NO: 1911 - DNA, 17 bp, Homo sapiens
tccaattctaccagcca

SEQ ID NO: 1912 - DNA, 17 bp, Homo sapiens
ccaattctaccagccac

SEQ ID NO: 1913 - DNA, 17 bp, Homo sapiens
caattctaccagccaca

SEQ ID NO: 1914 - DNA, 17 bp, Homo sapiens
aattctaccagccacag

SEQ ID NO: 1915 - DNA, 17 bp, Homo sapiens
attctaccagccacagg

SEQ ID NO: 1916 - DNA, 17 bp, Homo sapiens
ttctaccagccacaggg

SEQ ID NO: 1917 - DNA, 17 bp, Homo sapiens
tctaccagccacagggg

SEQ ID NO: 1918 - DNA, 17 bp, Homo sapiens
ctaccagccacagggga

SEQ ID NO: 1919 - DNA, 17 bp, Homo sapiens
taccagccacaggggat

SEQ ID NO: 1920 - DNA, 17 bp, Homo sapiens
accagccacaggggatc

SEQ ID NO: 1921 - DNA, 17 bp, Homo sapiens
ccagccacaggggatcc

SEQ ID NO: 1922 - DNA, 17 bp, Homo sapiens
cagccacaggggatccc

SEQ ID NO: 1923 - DNA, 17 bp, Homo sapiens
agccacaggggatcccc

SEQ ID NO: 1924 - DNA, 17 bp, Homo sapiens
gccacaggggatcccct

SEQ ID NO: 1925 - DNA, 17 bp, Homo sapiens
ccacaggggatcccctc

SEQ ID NO: 1926 - DNA, 17 bp, Homo sapiens
cacaggggatcccctcc

SEQ ID NO: 1927 - DNA, 17 bp, Homo sapiens
acaggggatcccctcct

SEQ ID NO: 1928 - DNA, 17 bp, Homo sapiens
caggggatcccctcctc

SEQ ID NO: 1929 - DNA, 17 bp, Homo sapiens
aggggatcccctcctcc

SEQ ID NO: 1930 - DNA, 17 bp, Homo sapiens
ggggatcccctcctccc

SEQ ID NO: 1931 - DNA, 17 bp, Homo sapiens
gggatcccctcctcccc

SEQ ID NO: 1932 - DNA, 17 bp, Homo sapiens
ggatcccctcctccccc

SEQ ID NO: 1933 - DNA, 17 bp, Homo sapiens
gatcccctcctccccct

SEQ ID NO: 1934 - DNA, 17 bp, Homo sapiens
atcccctcctccccctc

SEQ ID NO: 1935 - DNA, 17 bp, Homo sapiens
tcccctcctccccctca

SEQ ID NO: 1936 - DNA, 17 bp, Homo sapiens
cccctcctccccctcag

SEQ ID NO: 1937 - DNA, 17 bp, Homo sapiens
ccctcctccccctcagc

SEQ ID NO: 1938 - DNA, 17 bp, Homo sapiens
cctcctccccctcagcc

SEQ ID NO: 1939 - DNA, 17 bp, Homo sapiens
ctcctccccctcagccg

SEQ ID NO: 1940 - DNA, 17 bp, Homo sapiens
tcctccccctcagccgt

SEQ ID NO: 1941 - DNA, 17 bp, Homo sapiens
cctccccctcagccgtg

SEQ ID NO: 1942 - DNA, 17 bp, Homo sapiens
ctccccctcagccgtgg

SEQ ID NO: 1943 - DNA, 17 bp, Homo sapiens
tccccctcagccgtggt

SEQ ID NO: 1944 - DNA, 17 bp, Homo sapiens
ccccctcagccgtggtg

SEQ ID NO: 1945 - DNA, 17 bp, Homo sapiens
cccctcagccgtggtgg

SEQ ID NO: 1946 - DNA, 17 bp, Homo sapiens
ccctcagccgtggtggt

SEQ ID NO: 1947 - DNA, 17 bp, Homo sapiens
cctcagccgtggtggtg

SEQ ID NO: 1948 - DNA, 17 bp, Homo sapiens
ctcagccgtggtggtgg

SEQ ID NO: 1949 - DNA, 17 bp, Homo sapiens
tcagccgtggtggtgga

SEQ ID NO: 1950 - DNA, 17 bp, Homo sapiens
cagccgtggtggtggag

SEQ ID NO: 1951 - DNA, 17 bp, Homo sapiens
agccgtggtggtggaga

SEQ ID NO: 1952 - DNA, 17 bp, Homo sapiens
gccgtggtggtggagat

SEQ ID NO: 1953 - DNA, 17 bp, Homo sapiens
ccgtggtggtggagatg

SEQ ID NO: 1954 - DNA, 17 bp, Homo sapiens
cgtggtggtggagatgg

SEQ ID NO: 1955 - DNA, 17 bp, Homo sapiens
gtggtggtggagatggg

SEQ ID NO: 1956 - DNA, 17 bp, Homo sapiens
tggtggtggagatgggg

SEQ ID NO: 1957 - DNA, 17 bp, Homo sapiens
ggtggtggagatggggt

SEQ ID NO: 1958 - DNA, 17 bp, Homo sapiens
gtggtggagatggggtc

SEQ ID NO: 1959 - DNA, 17 bp, Homo sapiens
tggtggagatggggtcc

SEQ ID NO: 1960 - DNA, 17 bp, Homo sapiens
ggtggagatggggtcca

SEQ ID NO: 1961 - DNA, 17 bp, Homo sapiens
gtggagatggggtccaa

SEQ ID NO: 1962 - DNA, 17 bp, Homo sapiens
tggagatggggtccaag

SEQ ID NO: 1963 - DNA, 17 bp, Homo sapiens
ggagatggggtccaagc

SEQ ID NO: 1964 - DNA, 17 bp, Homo sapiens
gagatggggtccaagcc

SEQ ID NO: 1965 - DNA, 17 bp, Homo sapiens
agatggggtccaagcct

SEQ ID NO: 1966 - DNA, 17 bp, Homo sapiens
gatggggtccaagcctg

SEQ ID NO: 1967 - DNA, 17 bp, Homo sapiens
atggggtccaagcctgc

SEQ ID NO: 1968 - DNA, 17 bp, Homo sapiens
tggggtccaagcctgcc

SEQ ID NO: 1969 - DNA, 17 bp, Homo sapiens
ggggtccaagcctgccc

SEQ ID NO: 1970 - DNA, 17 bp, Homo sapiens
gggtccaagcctgccct

SEQ ID NO: 1971 - DNA, 17 bp, Homo sapiens
ggtccaagcctgccctc

SEQ ID NO: 1972 - DNA, 17 bp, Homo sapiens
gtccaagcctgccctca

SEQ ID NO: 1973 - DNA, 17 bp, Homo sapiens
tccaagcctgccctcac

SEQ ID NO: 1974 - DNA, 17 bp, Homo sapiens
ccaagcctgccctcacg

SEQ ID NO: 1975 - DNA, 17 bp, Homo sapiens
caagcctgccctcacgg

SEQ ID NO: 1976 - DNA, 17 bp, Homo sapiens
aagcctgccctcacggg

SEQ ID NO: 1977 - DNA, 17 bp, Homo sapiens
agcctgccctcacgggg

SEQ ID NO: 1978 - DNA, 17 bp, Homo sapiens
gcctgccctcacggggg

SEQ ID NO: 1979 - DNA, 17 bp, Homo sapiens
cctgccctcacggggga

SEQ ID NO: 1980 - DNA, 17 bp, Homo sapiens
ctgccctcacgggggag

SEQ ID NO: 1981 - DNA, 17 bp, Homo sapiens
tgccctcacgggggagc

SEQ ID NO: 1982 - DNA, 17 bp, Homo sapiens
gccctcacgggggagcc

SEQ ID NO: 1983 - DNA, 17 bp, Homo sapiens
ccctcacgggggagccc

SEQ ID NO: 1984 - DNA, 17 bp, Homo sapiens
cctcacgggggagcccg

SEQ ID NO: 1985 - DNA, 17 bp, Homo sapiens
ctcacgggggagcccgc

SEQ ID NO: 1986 - DNA, 17 bp, Homo sapiens
tcacgggggagcccgcc

SEQ ID NO: 1987 - DNA, 17 bp, Homo sapiens
cacgggggagcccgccc

SEQ ID NO: 1988 - DNA, 17 bp, Homo sapiens
acgggggagcccgccct

SEQ ID NO: 1989 - DNA, 17 bp, Homo sapiens
cgggggagcccgccctc

SEQ ID NO: 1990 - DNA, 17 bp, Homo sapiens
gggggagcccgccctca

SEQ ID NO: 1991 - DNA, 17 bp, Homo sapiens
ggggagcccgccctcac

SEQ ID NO: 1992 - DNA, 17 bp, Homo sapiens
gggagcccgccctcacg

SEQ ID NO: 1993 - DNA, 17 bp, Homo sapiens
ggagcccgccctcacgt

SEQ ID NO: 1994 - DNA, 17 bp, Homo sapiens
gagcccgccctcacgtg

SEQ ID NO: 1995 - DNA, 17 bp, Homo sapiens
agcccgccctcacgtgc

SEQ ID NO: 1996 - DNA, 17 bp, Homo sapiens
gcccgccctcacgtgca

SEQ ID NO: 1997 - DNA, 17 bp, Homo sapiens
cccgccctcacgtgcat

SEQ ID NO: 1998 - DNA, 17 bp, Homo sapiens
ccgccctcacgtgcatc

SEQ ID NO: 1999 - DNA, 17 bp, Homo sapiens
cgccctcacgtgcatca

SEQ ID NO: 2000 - DNA, 17 bp, Homo sapiens
gccctcacgtgcatcag

SEQ ID NO: 2001 - DNA, 17 bp, Homo sapiens
ccctcacgtgcatcagc

SEQ ID NO: 2002 - DNA, 17 bp, Homo sapiens
cctcacgtgcatcagca

SEQ ID NO: 2003 - DNA, 17 bp, Homo sapiens
ctcacgtgcatcagcag

SEQ ID NO: 2004 - DNA, 17 bp, Homo sapiens
tcacgtgcatcagcagg

SEQ ID NO: 2005 - DNA, 17 bp, Homo sapiens
cacgtgcatcagcaggg

SEQ ID NO: 2006 - DNA, 17 bp, Homo sapiens
acgtgcatcagcagggg

SEQ ID NO: 2007 - DNA, 17 bp, Homo sapiens
cgtgcatcagcaggggc

SEQ ID NO: 2008 - DNA, 17 bp, Homo sapiens
gtgcatcagcaggggca

SEQ ID NO: 2009 - DNA, 17 bp, Homo sapiens
tgcatcagcaggggcag

SEQ ID NO: 2010 - DNA, 17 bp, Homo sapiens
gcatcagcaggggcagt

SEQ ID NO: 2011 - DNA, 17 bp, Homo sapiens
catcagcaggggcagtg

SEQ ID NO: 2012 - DNA, 17 bp, Homo sapiens
atcagcaggggcagtga

SEQ ID NO: 2013 - DNA, 17 bp, Homo sapiens
tcagcaggggcagtgag

SEQ ID NO: 2014 - DNA, 17 bp, Homo sapiens
cagcaggggcagtgagg

SEQ ID NO: 2015 - DNA, 17 bp, Homo sapiens
agcaggggcagtgaggc

SEQ ID NO: 2016 - DNA, 17 bp, Homo sapiens
gcaggggcagtgaggcc

SEQ ID NO: 2017 - DNA, 17 bp, Homo sapiens
caggggcagtgaggccc

SEQ ID NO: 2018 - DNA, 17 bp, Homo sapiens
aggggcagtgaggcccg

SEQ ID NO: 2019 - DNA, 17 bp, Homo sapiens
ggggcagtgaggcccgg

SEQ ID NO: 2020 - DNA, 17 bp, Homo sapiens
gggcagtgaggcccgga

SEQ ID NO: 2021 - DNA, 17 bp, Homo sapiens
ggcagtgaggcccggac

SEQ ID NO: 2022 - DNA, 17 bp, Homo sapiens
gcagtgaggcccggacc

SEQ ID NO: 2023 - DNA, 17 bp, Homo sapiens
cagtgaggcccggaccc

SEQ ID NO: 2024 - DNA, 17 bp, Homo sapiens
agtgaggcccggaccca

SEQ ID NO: 2025 - DNA, 17 bp, Homo sapiens
gtgaggcccggacccac

SEQ ID NO: 2026 - DNA, 17 bp, Homo sapiens
tgaggcccggacccact

SEQ ID NO: 2027 - DNA, 17 bp, Homo sapiens
gaggcccggacccactc

SEQ ID NO: 2028 - DNA, 17 bp, Homo sapiens
aggcccggacccactcc

SEQ ID NO: 2029 - DNA, 17 bp, Homo sapiens
ggcccggacccactccg

SEQ ID NO: 2030 - DNA, 17 bp, Homo sapiens
gcccggacccactccgc

SEQ ID NO: 2031 - DNA, 17 bp, Homo sapiens
cccggacccactccgcg

SEQ ID NO: 2032 - DNA, 17 bp, Homo sapiens
ccggacccactccgcgg

SEQ ID NO: 2033 - DNA, 17 bp, Homo sapiens
cggacccactccgcggc

SEQ ID NO: 2034 - DNA, 17 bp, Homo sapiens
ggacccactccgcggcc

SEQ ID NO: 2035 - DNA, 17 bp, Homo sapiens
gacccactccgcggcca

SEQ ID NO: 2036 - DNA, 17 bp, Homo sapiens
acccactccgcggccag

SEQ ID NO: 2037 - DNA, 17 bp, Homo sapiens
cccactccgcggccagc

SEQ ID NO: 2038 - DNA, 17 bp, Homo sapiens
ccactccgcggccagct

SEQ ID NO: 2039 - DNA, 17 bp, Homo sapiens
cactccgcggccagctc

SEQ ID NO: 2040 - DNA, 17 bp, Homo sapiens
actccgcggccagctcc

SEQ ID NO: 2041 - DNA, 17 bp, Homo sapiens
ctccgcggccagctccc

SEQ ID NO: 2042 - DNA, 17 bp, Homo sapiens
tccgcggccagctccct

SEQ ID NO: 2043 - DNA, 17 bp, Homo sapiens
ccgcggccagctccctc

SEQ ID NO: 2044 - DNA, 17 bp, Homo sapiens
cgcggccagctccctca

SEQ ID NO: 2045 - DNA, 17 bp, Homo sapiens
gcggccagctccctcat

SEQ ID NO: 2046 - DNA, 17 bp, Homo sapiens
cggccagctccctcatt

SEQ ID NO: 2047 - DNA, 17 bp, Homo sapiens
ggccagctccctcatta

SEQ ID NO: 2048 - DNA, 17 bp, Homo sapiens
gccagctccctcattat

SEQ ID NO: 2049 - DNA, 17 bp, Homo sapiens
ccagctccctcattatg

SEQ ID NO: 2050 - DNA, 17 bp, Homo sapiens
cagctccctcattatgg

SEQ ID NO: 2051 - DNA, 17 bp, Homo sapiens
agctccctcattatgga

SEQ ID NO: 2052 - DNA, 17 bp, Homo sapiens
gctccctcattatggaa

SEQ ID NO: 2053 - DNA, 17 bp, Homo sapiens
ctccctcattatggaag

SEQ ID NO: 2054 - DNA, 17 bp, Homo sapiens
tccctcattatggaaga

SEQ ID NO: 2055 - DNA, 17 bp, Homo sapiens
ccctcattatggaagac

SEQ ID NO: 2056 - DNA, 17 bp, Homo sapiens
cctcattatggaagaca

SEQ ID NO: 2057 - DNA, 17 bp, Homo sapiens
ctcattatggaagacaa

SEQ ID NO: 2058 - DNA, 17 bp, Homo sapiens
tcattatggaagacaaa

SEQ ID NO: 2059 - DNA, 17 bp, Homo sapiens
cattatggaagacaaag

SEQ ID NO: 2060 - DNA, 17 bp, Homo sapiens
attatggaagacaaaga

SEQ ID NO: 2061 - DNA, 17 bp, Homo sapiens
ttatggaagacaaagaa

SEQ ID NO: 2062 - DNA, 17 bp, Homo sapiens
tatggaagacaaagaaa

SEQ ID NO: 2063 - DNA, 17 bp, Homo sapiens
atggaagacaaagaaat

SEQ ID NO: 2064 - DNA, 17 bp, Homo sapiens
tggaagacaaagaaatc

SEQ ID NO: 2065 - DNA, 17 bp, Homo sapiens
ggaagacaaagaaatcc

SEQ ID NO: 2066 - DNA, 17 bp, Homo sapiens
gaagacaaagaaatccc

SEQ ID NO: 2067 - DNA, 17 bp, Homo sapiens
aagacaaagaaatcccc

SEQ ID NO: 2068 - DNA, 17 bp, Homo sapiens
agacaaagaaatcccca

SEQ ID NO: 2069 - DNA, 17 bp, Homo sapiens
gacaaagaaatccccat

SEQ ID NO: 2070 - DNA, 17 bp, Homo sapiens
acaaagaaatccccatc

SEQ ID NO: 2071 - DNA, 17 bp, Homo sapiens
caaagaaatccccatca

SEQ ID NO: 2072 - DNA, 17 bp, Homo sapiens
aaagaaatccccatcaa

SEQ ID NO: 2073 - DNA, 17 bp, Homo sapiens
aagaaatccccatcaag

SEQ ID NO: 2074 - DNA, 17 bp, Homo sapiens
agaaatccccatcaaga

SEQ ID NO: 2075 - DNA, 17 bp, Homo sapiens
gaaatccccatcaagag

SEQ ID NO: 2076 - DNA, 17 bp, Homo sapiens
aaatccccatcaagagt

SEQ ID NO: 2077 - DNA, 17 bp, Homo sapiens
aatccccatcaagagtg

SEQ ID NO: 2078 - DNA, 17 bp, Homo sapiens
atccccatcaagagtga

SEQ ID NO: 2079 - DNA, 17 bp, Homo sapiens
tccccatcaagagtgag

SEQ ID NO: 2080 - DNA, 17 bp, Homo sapiens
ccccatcaagagtgagc

SEQ ID NO: 2081 - DNA, 17 bp, Homo sapiens
cccatcaagagtgagcc

SEQ ID NO: 2082 - DNA, 17 bp, Homo sapiens
ccatcaagagtgagcct

SEQ ID NO: 2083 - DNA, 17 bp, Homo sapiens
catcaagagtgagcctc

SEQ ID NO: 2084 - DNA, 17 bp, Homo sapiens
atcaagagtgagcctct

SEQ ID NO: 2085 - DNA, 17 bp, Homo sapiens
tcaagagtgagcctctg

SEQ ID NO: 2086 - DNA, 17 bp, Homo sapiens
caagagtgagcctctgc

SEQ ID NO: 2087 - DNA, 17 bp, Homo sapiens
aagagtgagcctctgcc

SEQ ID NO: 2088 - DNA, 17 bp, Homo sapiens
agagtgagcctctgcca

SEQ ID NO: 2089 - DNA, 17 bp, Homo sapiens
gagtgagcctctgccaa

SEQ ID NO: 2090 - DNA, 17 bp, Homo sapiens
agtgagcctctgccaaa

SEQ ID NO: 2091 - DNA, 17 bp, Homo sapiens
gtgagcctctgccaaaa

SEQ ID NO: 2092 - DNA, 17 bp, Homo sapiens
tgagcctctgccaaaac

SEQ ID NO: 2093 - DNA, 17 bp, Homo sapiens
gagcctctgccaaaacc

SEQ ID NO: 2094 - DNA, 17 bp, Homo sapiens
agcctctgccaaaaccg

SEQ ID NO: 2095 - DNA, 17 bp, Homo sapiens
gcctctgccaaaaccgc

SEQ ID NO: 2096 - DNA, 17 bp, Homo sapiens
cctctgccaaaaccgcc

SEQ ID NO: 2097 - DNA, 17 bp, Homo sapiens
ctctgccaaaaccgccc

SEQ ID NO: 2098 - DNA, 17 bp, Homo sapiens
tctgccaaaaccgcccg

SEQ ID NO: 2099 - DNA, 25 bp, Homo sapiens
aaagttttcaaagcggttggcagca

SEQ ID NO: 2100 - DNA, 25 bp, Homo sapiens
aagttttcaaagcggttggcagcag

SEQ ID NO: 2101 - DNA, 25 bp, Homo sapiens
agttttcaaagcggttggcagcagc

SEQ ID NO: 2102 - DNA, 25 bp, Homo sapiens
gttttcaaagcggttggcagcagcg

SEQ ID NO: 2103 - DNA, 25 bp, Homo sapiens
ttttcaaagcggttggcagcagcgg

SEQ ID NO: 2104 - DNA, 25 bp, Homo sapiens
tttcaaagcggttggcagcagcggc

SEQ ID NO: 2105 - DNA, 25 bp, Homo sapiens
ttcaaagcggttggcagcagcggcg

SEQ ID NO: 2106 - DNA, 25 bp, Homo sapiens
tcaaagcggttggcagcagcggcgc

SEQ ID NO: 2107 - DNA, 25 bp, Homo sapiens
caaagcggttggcagcagcggcgct

SEQ ID NO: 2108 - DNA, 25 bp, Homo sapiens
aaagcggttggcagcagcggcgctt

SEQ ID NO: 2109 - DNA, 25 bp, Homo sapiens
aagcggttggcagcagcggcgcttg

SEQ ID NO: 2110 - DNA, 25 bp, Homo sapiens
agcggttggcagcagcggcgcttgg

SEQ ID NO: 2111 - DNA, 25 bp, Homo sapiens
gcggttggcagcagcggcgcttgga

SEQ ID NO: 2112 - DNA, 25 bp, Homo sapiens
cggttggcagcagcggcgcttggag

SEQ ID NO: 2113 - DNA, 25 bp, Homo sapiens
ggttggcagcagcggcgcttggagg

SEQ ID NO: 2114 - DNA, 25 bp, Homo sapiens
gttggcagcagcggcgcttggagga

SEQ ID NO: 2115 - DNA, 25 bp, Homo sapiens
ttggcagcagcggcgcttggaggaa

SEQ ID NO: 2116 - DNA, 25 bp, Homo sapiens
tggcagcagcggcgcttggaggaaa

SEQ ID NO: 2117 - DNA, 25 bp, Homo sapiens
ggcagcagcggcgcttggaggaaag

SEQ ID NO: 2118 - DNA, 25 bp, Homo sapiens
gcagcagcggcgcttggaggaaagg

SEQ ID NO: 2119 - DNA, 25 bp, Homo sapiens
cagcagcggcgcttggaggaaagga

SEQ ID NO: 2120 - DNA, 25 bp, Homo sapiens
agcagcggcgcttggaggaaaggaa

SEQ ID NO: 2121 - DNA, 25 bp, Homo sapiens
gcagcggcgcttggaggaaaggaag

SEQ ID NO: 2122 - DNA, 25 bp, Homo sapiens
cagcggcgcttggaggaaaggaagc

SEQ ID NO: 2123 - DNA, 25 bp, Homo sapiens
agcggcgcttggaggaaaggaagcc

SEQ ID NO: 2124 - DNA, 25 bp, Homo sapiens
gcggcgcttggaggaaaggaagccg

SEQ ID NO: 2125 - DNA, 25 bp, Homo sapiens
cggcgcttggaggaaaggaagccgg

SEQ ID NO: 2126 - DNA, 25 bp, Homo sapiens
ggcgcttggaggaaaggaagccggt

SEQ ID NO: 2127 - DNA, 25 bp, Homo sapiens
gcgcttggaggaaaggaagccggtt

SEQ ID NO: 2128 - DNA, 25 bp, Homo sapiens
cgcttggaggaaaggaagccggttg

SEQ ID NO: 2129 - DNA, 25 bp, Homo sapiens
gcttggaggaaaggaagccggttgg

SEQ ID NO: 2130 - DNA, 25 bp, Homo sapiens
cttggaggaaaggaagccggttgga

SEQ ID NO: 2131 - DNA, 25 bp, Homo sapiens
ttggaggaaaggaagccggttggag

SEQ ID NO: 2132 - DNA, 25 bp, Homo sapiens
tggaggaaaggaagccggttggagg

SEQ ID NO: 2133 - DNA, 25 bp, Homo sapiens
ggaggaaaggaagccggttggaggg

SEQ ID NO: 2134 - DNA, 25 bp, Homo sapiens
gaggaaaggaagccggttggagggc

SEQ ID NO: 2135 - DNA, 25 bp, Homo sapiens
aggaaaggaagccggttggagggcg

SEQ ID NO: 2136 - DNA, 25 bp, Homo sapiens
ggaaaggaagccggttggagggcgc

SEQ ID NO: 2137 - DNA, 25 bp, Homo sapiens
gaaaggaagccggttggagggcgca

SEQ ID NO: 2138 - DNA, 25 bp, Homo sapiens
aaaggaagccggttggagggcgcag

SEQ ID NO: 2139 - DNA, 25 bp, Homo sapiens
aaggaagccggttggagggcgcagc

SEQ ID NO: 2140 - DNA, 25 bp, Homo sapiens
aggaagccggttggagggcgcagcg

SEQ ID NO: 2141 - DNA, 25 bp, Homo sapiens
ggaagccggttggagggcgcagcgc

SEQ ID NO: 2142 - DNA, 25 bp, Homo sapiens
gaagccggttggagggcgcagcgca

SEQ ID NO: 2143 - DNA, 25 bp, Homo sapiens
aagccggttggagggcgcagcgcac

SEQ ID NO: 2144 - DNA, 25 bp, Homo sapiens
agccggttggagggcgcagcgcacc

SEQ ID NO: 2145 - DNA, 25 bp, Homo sapiens
gccggttggagggcgcagcgcaccc

SEQ ID NO: 2146 - DNA, 25 bp, Homo sapiens
ccggttggagggcgcagcgcacccc

SEQ ID NO: 2147 - DNA, 25 bp, Homo sapiens
cggttggagggcgcagcgcacccct

SEQ ID NO: 2148 - DNA, 25 bp, Homo sapiens
ggttggagggcgcagcgcacccctg

SEQ ID NO: 2149 - DNA, 25 bp, Homo sapiens
gttggagggcgcagcgcacccctgc

SEQ ID NO: 2150 - DNA, 25 bp, Homo sapiens
ttggagggcgcagcgcacccctgct

SEQ ID NO: 2151 - DNA, 25 bp, Homo sapiens
tggagggcgcagcgcacccctgctg

SEQ ID NO: 2152 - DNA, 25 bp, Homo sapiens
ggagggcgcagcgcacccctgctgc

SEQ ID NO: 2153 - DNA, 25 bp, Homo sapiens
gagggcgcagcgcacccctgctgcg

SEQ ID NO: 2154 - DNA, 25 bp, Homo sapiens
agggcgcagcgcacccctgctgcgc

SEQ ID NO: 2155 - DNA, 25 bp, Homo sapiens
gggcgcagcgcacccctgctgcgcg

SEQ ID NO: 2156 - DNA, 25 bp, Homo sapiens
ggcgcagcgcacccctgctgcgcgg

SEQ ID NO: 2157 - DNA, 25 bp, Homo sapiens
gcgcagcgcacccctgctgcgcgga

SEQ ID NO: 2158 - DNA, 25 bp, Homo sapiens
cgcagcgcacccctgctgcgcggag

SEQ ID NO: 2159 - DNA, 25 bp, Homo sapiens
gcagcgcacccctgctgcgcggagg

SEQ ID NO: 2160 - DNA, 25 bp, Homo sapiens
cagcgcacccctgctgcgcggagga

SEQ ID NO: 2161 - DNA, 25 bp, Homo sapiens
agcgcacccctgctgcgcggaggag

SEQ ID NO: 2162 - DNA, 25 bp, Homo sapiens
gcgcacccctgctgcgcggaggagg

SEQ ID NO: 2163 - DNA, 25 bp, Homo sapiens
cgcacccctgctgcgcggaggaggg

SEQ ID NO: 2164 - DNA, 25 bp, Homo sapiens
gcacccctgctgcgcggaggagggg

SEQ ID NO: 2165 - DNA, 25 bp, Homo sapiens
cacccctgctgcgcggaggaggggg

SEQ ID NO: 2166 - DNA, 25 bp, Homo sapiens
acccctgctgcgcggaggagggggc

SEQ ID NO: 2167 - DNA, 25 bp, Homo sapiens
cccctgctgcgcggaggagggggct

SEQ ID NO: 2168 - DNA, 25 bp, Homo sapiens
ccctgctgcgcggaggagggggctg

SEQ ID NO: 2169 - DNA, 25 bp, Homo sapiens
cctgctgcgcggaggagggggctga

SEQ ID NO: 2170 - DNA, 25 bp, Homo sapiens
ctgctgcgcggaggagggggctgag

SEQ ID NO: 2171 - DNA, 25 bp, Homo sapiens
tgctgcgcggaggagggggctgagc

SEQ ID NO: 2172 - DNA, 25 bp, Homo sapiens
gctgcgcggaggagggggctgagct

SEQ ID NO: 2173 - DNA, 25 bp, Homo sapiens
ctgcgcggaggagggggctgagctg

SEQ ID NO: 2174 - DNA, 25 bp, Homo sapiens
tgcgcggaggagggggctgagctga

SEQ ID NO: 2175 - DNA, 25 bp, Homo sapiens
gcgcggaggagggggctgagctgaa

SEQ ID NO: 2176 - DNA, 25 bp, Homo sapiens
cgcggaggagggggctgagctgaac

SEQ ID NO: 2177 - DNA, 25 bp, Homo sapiens
gcggaggagggggctgagctgaact

SEQ ID NO: 2178 - DNA, 25 bp, Homo sapiens
cggaggagggggctgagctgaactc

SEQ ID NO: 2179 - DNA, 25 bp, Homo sapiens
ggaggagggggctgagctgaactca

SEQ ID NO: 2180 - DNA, 25 bp, Homo sapiens
gaggagggggctgagctgaactcag

SEQ ID NO: 2181 - DNA, 25 bp, Homo sapiens
aggagggggctgagctgaactcagc

SEQ ID NO: 2182 - DNA, 25 bp, Homo sapiens
ggagggggctgagctgaactcagca

SEQ ID NO: 2183 - DNA, 25 bp, Homo sapiens
gagggggctgagctgaactcagcag

SEQ ID NO: 2184 - DNA, 25 bp, Homo sapiens
agggggctgagctgaactcagcaga

SEQ ID NO: 2185 - DNA, 25 bp, Homo sapiens
gggggctgagctgaactcagcagaa

SEQ ID NO: 2186 - DNA, 25 bp, Homo sapiens
ggggctgagctgaactcagcagaag

SEQ ID NO: 2187 - DNA, 25 bp, Homo sapiens
gggctgagctgaactcagcagaagt

SEQ ID NO: 2188 - DNA, 25 bp, Homo sapiens
ggctgagctgaactcagcagaagtt

SEQ ID NO: 2189 - DNA, 25 bp, Homo sapiens
gctgagctgaactcagcagaagtta

SEQ ID NO: 2190 - DNA, 25 bp, Homo sapiens
ctgagctgaactcagcagaagttac

SEQ ID NO: 2191 - DNA, 25 bp, Homo sapiens
tgagctgaactcagcagaagttaca

SEQ ID NO: 2192 - DNA, 25 bp, Homo sapiens
gagctgaactcagcagaagttacat

SEQ ID NO: 2193 - DNA, 25 bp, Homo sapiens
agctgaactcagcagaagttacatg

SEQ ID NO: 2194 - DNA, 25 bp, Homo sapiens
gctgaactcagcagaagttacatgc

SEQ ID NO: 2195 - DNA, 25 bp, Homo sapiens
ctgaactcagcagaagttacatgca

SEQ ID NO: 2196 - DNA, 25 bp, Homo sapiens
tgaactcagcagaagttacatgcac

SEQ ID NO: 2197 - DNA, 25 bp, Homo sapiens
gaactcagcagaagttacatgcaca

SEQ ID NO: 2198 - DNA, 25 bp, Homo sapiens
aactcagcagaagttacatgcacaa

SEQ ID NO: 2199 - DNA, 25 bp, Homo sapiens
actcagcagaagttacatgcacaag

SEQ ID NO: 2200 - DNA, 25 bp, Homo sapiens
ctcagcagaagttacatgcacaagg

SEQ ID NO: 2201 - DNA, 25 bp, Homo sapiens
tcagcagaagttacatgcacaaggc

SEQ ID NO: 2202 - DNA, 25 bp, Homo sapiens
cagcagaagttacatgcacaaggca

SEQ ID NO: 2203 - DNA, 25 bp, Homo sapiens
agcagaagttacatgcacaaggcaa

SEQ ID NO: 2204 - DNA, 25 bp, Homo sapiens
gcagaagttacatgcacaaggcaaa

SEQ ID NO: 2205 - DNA, 25 bp, Homo sapiens
cagaagttacatgcacaaggcaaaa

SEQ ID NO: 2206 - DNA, 25 bp, Homo sapiens
agaagttacatgcacaaggcaaaaa

SEQ ID NO: 2207 - DNA, 25 bp, Homo sapiens
gaagttacatgcacaaggcaaaaat

SEQ ID NO: 2208 - DNA, 25 bp, Homo sapiens
aagttacatgcacaaggcaaaaatt

SEQ ID NO: 2209 - DNA, 25 bp, Homo sapiens
agttacatgcacaaggcaaaaattc

SEQ ID NO: 2210 - DNA, 25 bp, Homo sapiens
gttacatgcacaaggcaaaaattct

SEQ ID NO: 2211 - DNA, 25 bp, Homo sapiens
ttacatgcacaaggcaaaaattctg

SEQ ID NO: 2212 - DNA, 25 bp, Homo sapiens
tacatgcacaaggcaaaaattctga

SEQ ID NO: 2213 - DNA, 25 bp, Homo sapiens
acatgcacaaggcaaaaattctgac

SEQ ID NO: 2214 - DNA, 25 bp, Homo sapiens
catgcacaaggcaaaaattctgacg

SEQ ID NO: 2215 - DNA, 25 bp, Homo sapiens
atgcacaaggcaaaaattctgacgt

SEQ ID NO: 2216 - DNA, 25 bp, Homo sapiens
tgcacaaggcaaaaattctgacgtt

SEQ ID NO: 2217 - DNA, 25 bp, Homo sapiens
gcacaaggcaaaaattctgacgttc

SEQ ID NO: 2218 - DNA, 25 bp, Homo sapiens
cacaaggcaaaaattctgacgttct

SEQ ID NO: 2219 - DNA, 25 bp, Homo sapiens
acaaggcaaaaattctgacgttctc

SEQ ID NO: 2220 - DNA, 25 bp, Homo sapiens
caaggcaaaaattctgacgttctca

SEQ ID NO: 2221 - DNA, 25 bp, Homo sapiens
aaggcaaaaattctgacgttctcaa

SEQ ID NO: 2222 - DNA, 25 bp, Homo sapiens
aggcaaaaattctgacgttctcaag

SEQ ID NO: 2223 - DNA, 25 bp, Homo sapiens
ggcaaaaattctgacgttctcaaga

SEQ ID NO: 2224 - DNA, 25 bp, Homo sapiens
gcaaaaattctgacgttctcaagag

SEQ ID NO: 2225 - DNA, 25 bp, Homo sapiens
caaaaattctgacgttctcaagaga

SEQ ID NO: 2226 - DNA, 25 bp, Homo sapiens
aaaaattctgacgttctcaagagac

SEQ ID NO: 2227 - DNA, 25 bp, Homo sapiens
aaaattctgacgttctcaagagacc

SEQ ID NO: 2228 - DNA, 25 bp, Homo sapiens
aaattctgacgttctcaagagacca

SEQ ID NO: 2229 - DNA, 25 bp, Homo sapiens
aattctgacgttctcaagagaccag

SEQ ID NO: 2230 - DNA, 25 bp, Homo sapiens
attctgacgttctcaagagaccagc

SEQ ID NO: 2231 - DNA, 25 bp, Homo sapiens
ttctgacgttctcaagagaccagct

SEQ ID NO: 2232 - DNA, 25 bp, Homo sapiens
tctgacgttctcaagagaccagctc

SEQ ID NO: 2233 - DNA, 25 bp, Homo sapiens
ctgacgttctcaagagaccagctct

SEQ ID NO: 2234 - DNA, 25 bp, Homo sapiens
tgacgttctcaagagaccagctctg

SEQ ID NO: 2235 - DNA, 25 bp, Homo sapiens
gacgttctcaagagaccagctctgc

SEQ ID NO: 2236 - DNA, 25 bp, Homo sapiens
acgttctcaagagaccagctctgcc

SEQ ID NO: 2237 - DNA, 25 bp, Homo sapiens
cgttctcaagagaccagctctgccc

SEQ ID NO: 2238 - DNA, 25 bp, Homo sapiens
gttctcaagagaccagctctgcccc

SEQ ID NO: 2239 - DNA, 25 bp, Homo sapiens
ttctcaagagaccagctctgccccc

SEQ ID NO: 2240 - DNA, 25 bp, Homo sapiens
tctcaagagaccagctctgcccccg

SEQ ID NO: 2241 - DNA, 25 bp, Homo sapiens
ctcaagagaccagctctgcccccgt

SEQ ID NO: 2242 - DNA, 25 bp, Homo sapiens
tcaagagaccagctctgcccccgtg

SEQ ID NO: 2243 - DNA, 25 bp, Homo sapiens
caagagaccagctctgcccccgtgg

SEQ ID NO: 2244 - DNA, 25 bp, Homo sapiens
aagagaccagctctgcccccgtggc

SEQ ID NO: 2245 - DNA, 25 bp, Homo sapiens
agagaccagctctgcccccgtggct

SEQ ID NO: 2246 - DNA, 25 bp, Homo sapiens
gagaccagctctgcccccgtggctc

SEQ ID NO: 2247 - DNA, 25 bp, Homo sapiens
agaccagctctgcccccgtggctca

SEQ ID NO: 2248 - DNA, 25 bp, Homo sapiens
gaccagctctgcccccgtggctcaa

SEQ ID NO: 2249 - DNA, 25 bp, Homo sapiens
accagctctgcccccgtggctcaac

SEQ ID NO: 2250 - DNA, 25 bp, Homo sapiens
ccagctctgcccccgtggctcaact

SEQ ID NO: 2251 - DNA, 25 bp, Homo sapiens
cagctctgcccccgtggctcaactg

SEQ ID NO: 2252 - DNA, 25 bp, Homo sapiens
agctctgcccccgtggctcaactga

SEQ ID NO: 2253 - DNA, 25 bp, Homo sapiens
gctctgcccccgtggctcaactgac

SEQ ID NO: 2254 - DNA, 25 bp, Homo sapiens
ctctgcccccgtggctcaactgacc

SEQ ID NO: 2255 - DNA, 25 bp, Homo sapiens
tctgcccccgtggctcaactgaccc

SEQ ID NO: 2256 - DNA, 25 bp, Homo sapiens
ctgcccccgtggctcaactgaccct

SEQ ID NO: 2257 - DNA, 25 bp, Homo sapiens
tgcccccgtggctcaactgacccta

SEQ ID NO: 2258 - DNA, 25 bp, Homo sapiens
gcccccgtggctcaactgaccctac

SEQ ID NO: 2259 - DNA, 25 bp, Homo sapiens
cccccgtggctcaactgaccctacc

SEQ ID NO: 2260 - DNA, 25 bp, Homo sapiens
ccccgtggctcaactgaccctacca

SEQ ID NO: 2261 - DNA, 25 bp, Homo sapiens
cccgtggctcaactgaccctaccat

SEQ ID NO: 2262 - DNA, 25 bp, Homo sapiens
ccgtggctcaactgaccctaccatg

SEQ ID NO: 2263 - DNA, 25 bp, Homo sapiens
cgtggctcaactgaccctaccatgt

SEQ ID NO: 2264 - DNA, 25 bp, Homo sapiens
gtggctcaactgaccctaccatgtg

SEQ ID NO: 2265 - DNA, 25 bp, Homo sapiens
tggctcaactgaccctaccatgtgg

SEQ ID NO: 2266 - DNA, 25 bp, Homo sapiens
ggctcaactgaccctaccatgtgga

SEQ ID NO: 2267 - DNA, 25 bp, Homo sapiens
gctcaactgaccctaccatgtggac

SEQ ID NO: 2268 - DNA, 25 bp, Homo sapiens
ctcaactgaccctaccatgtggacg

SEQ ID NO: 2269 - DNA, 25 bp, Homo sapiens
tcaactgaccctaccatgtggacgc

SEQ ID NO: 2270 - DNA, 25 bp, Homo sapiens
caactgaccctaccatgtggacgct

SEQ ID NO: 2271 - DNA, 25 bp, Homo sapiens
aactgaccctaccatgtggacgctg

SEQ ID NO: 2272 - DNA, 25 bp, Homo sapiens
actgaccctaccatgtggacgctgc

SEQ ID NO: 2273 - DNA, 25 bp, Homo sapiens
ctgaccctaccatgtggacgctgct

SEQ ID NO: 2274 - DNA, 25 bp, Homo sapiens
tgaccctaccatgtggacgctgctc

SEQ ID NO: 2275 - DNA, 25 bp, Homo sapiens
gaccctaccatgtggacgctgctcc

SEQ ID NO: 2276 - DNA, 25 bp, Homo sapiens
accctaccatgtggacgctgctcct

SEQ ID NO: 2277 - DNA, 25 bp, Homo sapiens
ccctaccatgtggacgctgctcctc

SEQ ID NO: 2278 - DNA, 25 bp, Homo sapiens
cctaccatgtggacgctgctcctcc

SEQ ID NO: 2279 - DNA, 25 bp, Homo sapiens
ctaccatgtggacgctgctcctcca

SEQ ID NO: 2280 - DNA, 25 bp, Homo sapiens
taccatgtggacgctgctcctccag

SEQ ID NO: 2281 - DNA, 25 bp, Homo sapiens
accatgtggacgctgctcctccagg

SEQ ID NO: 2282 - DNA, 25 bp, Homo sapiens
ccatgtggacgctgctcctccaggt

SEQ ID NO: 2283 - DNA, 25 bp, Homo sapiens
catgtggacgctgctcctccaggtg

SEQ ID NO: 2284 - DNA, 25 bp, Homo sapiens
atgtggacgctgctcctccaggtgg

SEQ ID NO: 2285 - DNA, 25 bp, Homo sapiens
tgtggacgctgctcctccaggtggg

SEQ ID NO: 2286 - DNA, 25 bp, Homo sapiens
gtggacgctgctcctccaggtggga

SEQ ID NO: 2287 - DNA, 25 bp, Homo sapiens
tggacgctgctcctccaggtgggaa

SEQ ID NO: 2288 - DNA, 25 bp, Homo sapiens
ggacgctgctcctccaggtgggaac

SEQ ID NO: 2289 - DNA, 25 bp, Homo sapiens
gacgctgctcctccaggtgggaact

SEQ ID NO: 2290 - DNA, 25 bp, Homo sapiens
acgctgctcctccaggtgggaactg

SEQ ID NO: 2291 - DNA, 25 bp, Homo sapiens
cgctgctcctccaggtgggaactgg

SEQ ID NO: 2292 - DNA, 25 bp, Homo sapiens
gctgctcctccaggtgggaactgga

SEQ ID NO: 2293 - DNA, 25 bp, Homo sapiens
ctgctcctccaggtgggaactggag

SEQ ID NO: 2294 - DNA, 25 bp, Homo sapiens
tgctcctccaggtgggaactggagt

SEQ ID NO: 2295 - DNA, 25 bp, Homo sapiens
gctcctccaggtgggaactggagtt

SEQ ID NO: 2296 - DNA, 25 bp, Homo sapiens
ctcctccaggtgggaactggagttt

SEQ ID NO: 2297 - DNA, 25 bp, Homo sapiens
tcctccaggtgggaactggagtttt

SEQ ID NO: 2298 - DNA, 25 bp, Homo sapiens
cctccaggtgggaactggagttttg

SEQ ID NO: 2299 - DNA, 25 bp, Homo sapiens
ctccaggtgggaactggagttttga

SEQ ID NO: 2300 - DNA, 25 bp, Homo sapiens
tccaggtgggaactggagttttgaa

SEQ ID NO: 2301 - DNA, 25 bp, Homo sapiens
ccaggtgggaactggagttttgaaa

SEQ ID NO: 2302 - DNA, 25 bp, Homo sapiens
caggtgggaactggagttttgaaat

SEQ ID NO: 2303 - DNA, 25 bp, Homo sapiens
aggtgggaactggagttttgaaata

SEQ ID NO: 2304 - DNA, 25 bp, Homo sapiens
ggtgggaactggagttttgaaataa

SEQ ID NO: 2305 - DNA, 25 bp, Homo sapiens
gtgggaactggagttttgaaataaa

SEQ ID NO: 2306 - DNA, 25 bp, Homo sapiens
tgggaactggagttttgaaataaaa

SEQ ID NO: 2307 - DNA, 25 bp, Homo sapiens
gggaactggagttttgaaataaaat

SEQ ID NO: 2308 - DNA, 25 bp, Homo sapiens
ggaactggagttttgaaataaaatg

SEQ ID NO: 2309 - DNA, 25 bp, Homo sapiens
gaactggagttttgaaataaaatgg

SEQ ID NO: 2310 - DNA, 25 bp, Homo sapiens
aactggagttttgaaataaaatgga

SEQ ID NO: 2311 - DNA, 25 bp, Homo sapiens
actggagttttgaaataaaatggat

SEQ ID NO: 2312 - DNA, 25 bp, Homo sapiens
ctggagttttgaaataaaatggatg

SEQ ID NO: 2313 - DNA, 25 bp, Homo sapiens
tggagttttgaaataaaatggatga

SEQ ID NO: 2314 - DNA, 25 bp, Homo sapiens
ggagttttgaaataaaatggatgat

SEQ ID NO: 2315 - DNA, 25 bp, Homo sapiens
gagttttgaaataaaatggatgatt

SEQ ID NO: 2316 - DNA, 25 bp, Homo sapiens
agttttgaaataaaatggatgattt

SEQ ID NO: 2317 - DNA, 25 bp, Homo sapiens
gttttgaaataaaatggatgatttg

SEQ ID NO: 2318 - DNA, 25 bp, Homo sapiens
ttttgaaataaaatggatgatttga

SEQ ID NO: 2319 - DNA, 25 bp, Homo sapiens
tttgaaataaaatggatgatttgac

SEQ ID NO: 2320 - DNA, 25 bp, Homo sapiens
ttgaaataaaatggatgatttgacg

SEQ ID NO: 2321 - DNA, 25 bp, Homo sapiens
tgaaataaaatggatgatttgacgt

SEQ ID NO: 2322 - DNA, 25 bp, Homo sapiens
gaaataaaatggatgatttgacgtt

SEQ ID NO: 2323 - DNA, 25 bp, Homo sapiens
aaataaaatggatgatttgacgtta

SEQ ID NO: 2324 - DNA, 25 bp, Homo sapiens
aataaaatggatgatttgacgttac

SEQ ID NO: 2325 - DNA, 25 bp, Homo sapiens
ataaaatggatgatttgacgttact

SEQ ID NO: 2326 - DNA, 25 bp, Homo sapiens
taaaatggatgatttgacgttactt

SEQ ID NO: 2327 - DNA, 25 bp, Homo sapiens
aaaatggatgatttgacgttacttg

SEQ ID NO: 2328 - DNA, 25 bp, Homo sapiens
aaatggatgatttgacgttacttga

SEQ ID NO: 2329 - DNA, 25 bp, Homo sapiens
aatggatgatttgacgttacttgat

SEQ ID NO: 2330 - DNA, 25 bp, Homo sapiens
atggatgatttgacgttacttgatc

SEQ ID NO: 2331 - DNA, 25 bp, Homo sapiens
tggatgatttgacgttacttgatct

SEQ ID NO: 2332 - DNA, 25 bp, Homo sapiens
ggatgatttgacgttacttgatctt

SEQ ID NO: 2333 - DNA, 25 bp, Homo sapiens
gatgatttgacgttacttgatcttc

SEQ ID NO: 2334 - DNA, 25 bp, Homo sapiens
atgatttgacgttacttgatcttct

SEQ ID NO: 2335 - DNA, 25 bp, Homo sapiens
tgatttgacgttacttgatcttctg

SEQ ID NO: 2336 - DNA, 25 bp, Homo sapiens
gatttgacgttacttgatcttctgg

SEQ ID NO: 2337 - DNA, 25 bp, Homo sapiens
atttgacgttacttgatcttctgga

SEQ ID NO: 2338 - DNA, 25 bp, Homo sapiens
tttgacgttacttgatcttctggag

SEQ ID NO: 2339 - DNA, 25 bp, Homo sapiens
ttgacgttacttgatcttctggagt

SEQ ID NO: 2340 - DNA, 25 bp, Homo sapiens
tgacgttacttgatcttctggagtg

SEQ ID NO: 2341 - DNA, 25 bp, Homo sapiens
gacgttacttgatcttctggagtgc

SEQ ID NO: 2342 - DNA, 25 bp, Homo sapiens
acgttacttgatcttctggagtgcc

SEQ ID NO: 2343 - DNA, 25 bp, Homo sapiens
cgttacttgatcttctggagtgccc

SEQ ID NO: 2344 - DNA, 25 bp, Homo sapiens
gttacttgatcttctggagtgccct

SEQ ID NO: 2345 - DNA, 25 bp, Homo sapiens
ttacttgatcttctggagtgccctg

SEQ ID NO: 2346 - DNA, 25 bp, Homo sapiens
tacttgatcttctggagtgccctgt

SEQ ID NO: 2347 - DNA, 25 bp, Homo sapiens
acttgatcttctggagtgccctgtg

SEQ ID NO: 2348 - DNA, 25 bp, Homo sapiens
cttgatcttctggagtgccctgtgt

SEQ ID NO: 2349 - DNA, 25 bp, Homo sapiens
ttgatcttctggagtgccctgtgtg

SEQ ID NO: 2350 - DNA, 25 bp, Homo sapiens
tgatcttctggagtgccctgtgtgc

SEQ ID NO: 2351 - DNA, 25 bp, Homo sapiens
gatcttctggagtgccctgtgtgct

SEQ ID NO: 2352 - DNA, 25 bp, Homo sapiens
atcttctggagtgccctgtgtgctt

SEQ ID NO: 2353 - DNA, 25 bp, Homo sapiens
tcttctggagtgccctgtgtgcttt

SEQ ID NO: 2354 - DNA, 25 bp, Homo sapiens
cttctggagtgccctgtgtgctttg

SEQ ID NO: 2355 - DNA, 25 bp, Homo sapiens
ttctggagtgccctgtgtgctttga

SEQ ID NO: 2356 - DNA, 25 bp, Homo sapiens
tctggagtgccctgtgtgctttgag

SEQ ID NO: 2357 - DNA, 25 bp, Homo sapiens
ctggagtgccctgtgtgctttgaga

SEQ ID NO: 2358 - DNA, 25 bp, Homo sapiens
tggagtgccctgtgtgctttgagaa

SEQ ID NO: 2359 - DNA, 25 bp, Homo sapiens
ggagtgccctgtgtgctttgagaag

SEQ ID NO: 2360 - DNA, 25 bp, Homo sapiens
gagtgccctgtgtgctttgagaagc

SEQ ID NO: 2361 - DNA, 25 bp, Homo sapiens
agtgccctgtgtgctttgagaagct

SEQ ID NO: 2362 - DNA, 25 bp, Homo sapiens
gtgccctgtgtgctttgagaagctc

SEQ ID NO: 2363 - DNA, 25 bp, Homo sapiens
tgccctgtgtgctttgagaagctcg

SEQ ID NO: 2364 - DNA, 25 bp, Homo sapiens
gccctgtgtgctttgagaagctcga

SEQ ID NO: 2365 - DNA, 25 bp, Homo sapiens
ccctgtgtgctttgagaagctcgat

SEQ ID NO: 2366 - DNA, 25 bp, Homo sapiens
cctgtgtgctttgagaagctcgatg

SEQ ID NO: 2367 - DNA, 25 bp, Homo sapiens
ctgtgtgctttgagaagctcgatgt

SEQ ID NO: 2368 - DNA, 25 bp, Homo sapiens
tgtgtgctttgagaagctcgatgtc

SEQ ID NO: 2369 - DNA, 25 bp, Homo sapiens
gtgtgctttgagaagctcgatgtca

SEQ ID NO: 2370 - DNA, 25 bp, Homo sapiens
tgtgctttgagaagctcgatgtcac

SEQ ID NO: 2371 - DNA, 25 bp, Homo sapiens
gtgctttgagaagctcgatgtcaca

SEQ ID NO: 2372 - DNA, 25 bp, Homo sapiens
tgctttgagaagctcgatgtcacag

SEQ ID NO: 2373 - DNA, 25 bp, Homo sapiens
gctttgagaagctcgatgtcacagc

SEQ ID NO: 2374 - DNA, 25 bp, Homo sapiens
ctttgagaagctcgatgtcacagcc

SEQ ID NO: 2375 - DNA, 25 bp, Homo sapiens
tttgagaagctcgatgtcacagcca

SEQ ID NO: 2376 - DNA, 25 bp, Homo sapiens
ttgagaagctcgatgtcacagccaa

SEQ ID NO: 2377 - DNA, 25 bp, Homo sapiens
tgagaagctcgatgtcacagccaaa

SEQ ID NO: 2378 - DNA, 25 bp, Homo sapiens
gagaagctcgatgtcacagccaaag

SEQ ID NO: 2379 - DNA, 25 bp, Homo sapiens
agaagctcgatgtcacagccaaagt

SEQ ID NO: 2380 - DNA, 25 bp, Homo sapiens
gaagctcgatgtcacagccaaagtc

SEQ ID NO: 2381 - DNA, 25 bp, Homo sapiens
aagctcgatgtcacagccaaagtcc

SEQ ID NO: 2382 - DNA, 25 bp, Homo sapiens
agctcgatgtcacagccaaagtcct

SEQ ID NO: 2383 - DNA, 25 bp, Homo sapiens
gctcgatgtcacagccaaagtcctc

SEQ ID NO: 2384 - DNA, 25 bp, Homo sapiens
ctcgatgtcacagccaaagtcctcc

SEQ ID NO: 2385 - DNA, 25 bp, Homo sapiens
tcgatgtcacagccaaagtcctccc

SEQ ID NO: 2386 - DNA, 25 bp, Homo sapiens
cgatgtcacagccaaagtcctccct

SEQ ID NO: 2387 - DNA, 25 bp, Homo sapiens
gatgtcacagccaaagtcctccctt

SEQ ID NO: 2388 - DNA, 25 bp, Homo sapiens
atgtcacagccaaagtcctcccttg

SEQ ID NO: 2389 - DNA, 25 bp, Homo sapiens
tgtcacagccaaagtcctcccttgc

SEQ ID NO: 2390 - DNA, 25 bp, Homo sapiens
gtcacagccaaagtcctcccttgcc

SEQ ID NO: 2391 - DNA, 25 bp, Homo sapiens
tcacagccaaagtcctcccttgcca

SEQ ID NO: 2392 - DNA, 25 bp, Homo sapiens
cacagccaaagtcctcccttgccag

SEQ ID NO: 2393 - DNA, 25 bp, Homo sapiens
acagccaaagtcctcccttgccagc

SEQ ID NO: 2394 - DNA, 25 bp, Homo sapiens
cagccaaagtcctcccttgccagca

SEQ ID NO: 2395 - DNA, 25 bp, Homo sapiens
agccaaagtcctcccttgccagcac

SEQ ID NO: 2396 - DNA, 25 bp, Homo sapiens
gccaaagtcctcccttgccagcaca

SEQ ID NO: 2397 - DNA, 25 bp, Homo sapiens
ccaaagtcctcccttgccagcacac

SEQ ID NO: 2398 - DNA, 25 bp, Homo sapiens
caaagtcctcccttgccagcacacc

SEQ ID NO: 2399 - DNA, 25 bp, Homo sapiens
aaagtcctcccttgccagcacacct

SEQ ID NO: 2400 - DNA, 25 bp, Homo sapiens
aagtcctcccttgccagcacacctt

SEQ ID NO: 2401 - DNA, 25 bp, Homo sapiens
agtcctcccttgccagcacaccttc

SEQ ID NO: 2402 - DNA, 25 bp, Homo sapiens
gtcctcccttgccagcacaccttct

SEQ ID NO: 2403 - DNA, 25 bp, Homo sapiens
tcctcccttgccagcacaccttctg

SEQ ID NO: 2404 - DNA, 25 bp, Homo sapiens
cctcccttgccagcacaccttctgc

SEQ ID NO: 2405 - DNA, 25 bp, Homo sapiens
ctcccttgccagcacaccttctgca

SEQ ID NO: 2406 - DNA, 25 bp, Homo sapiens
tcccttgccagcacaccttctgcaa

SEQ ID NO: 2407 - DNA, 25 bp, Homo sapiens
cccttgccagcacaccttctgcaaa

SEQ ID NO: 2408 - DNA, 25 bp, Homo sapiens
ccttgccagcacaccttctgcaaac

SEQ ID NO: 2409 - DNA, 25 bp, Homo sapiens
cttgccagcacaccttctgcaaacc

SEQ ID NO: 2410 - DNA, 25 bp, Homo sapiens
ttgccagcacaccttctgcaaacca

SEQ ID NO: 2411 - DNA, 25 bp, Homo sapiens
tgccagcacaccttctgcaaaccat

SEQ ID NO: 2412 - DNA, 25 bp, Homo sapiens
gccagcacaccttctgcaaaccatg

SEQ ID NO: 2413 - DNA, 25 bp, Homo sapiens
ccagcacaccttctgcaaaccatgt

SEQ ID NO: 2414 - DNA, 25 bp, Homo sapiens
cagcacaccttctgcaaaccatgtc

SEQ ID NO: 2415 - DNA, 25 bp, Homo sapiens
agcacaccttctgcaaaccatgtct

SEQ ID NO: 2416 - DNA, 25 bp, Homo sapiens
gcacaccttctgcaaaccatgtcta

SEQ ID NO: 2417 - DNA, 25 bp, Homo sapiens
cacaccttctgcaaaccatgtctac

SEQ ID NO: 2418 - DNA, 25 bp, Homo sapiens
acaccttctgcaaaccatgtctaca

SEQ ID NO: 2419 - DNA, 25 bp, Homo sapiens
caccttctgcaaaccatgtctacag

SEQ ID NO: 2420 - DNA, 25 bp, Homo sapiens
accttctgcaaaccatgtctacaga

SEQ ID NO: 2421 - DNA, 25 bp, Homo sapiens
ccttctgcaaaccatgtctacagag

SEQ ID NO: 2422 - DNA, 25 bp, Homo sapiens
cttctgcaaaccatgtctacagagg

SEQ ID NO: 2423 - DNA, 25 bp, Homo sapiens
ttctgcaaaccatgtctacagaggg

SEQ ID NO: 2424 - DNA, 25 bp, Homo sapiens
tctgcaaaccatgtctacagagggt

SEQ ID NO: 2425 - DNA, 25 bp, Homo sapiens
ctgcaaaccatgtctacagagggtt

SEQ ID NO: 2426 - DNA, 25 bp, Homo sapiens
tgcaaaccatgtctacagagggttt

SEQ ID NO: 2427 - DNA, 25 bp, Homo sapiens
gcaaaccatgtctacagagggtttt

SEQ ID NO: 2428 - DNA, 25 bp, Homo sapiens
caaaccatgtctacagagggttttc

SEQ ID NO: 2429 - DNA, 25 bp, Homo sapiens
aaaccatgtctacagagggttttca

SEQ ID NO: 2430 - DNA, 25 bp, Homo sapiens
aaccatgtctacagagggttttcaa

SEQ ID NO: 2431 - DNA, 25 bp, Homo sapiens
accatgtctacagagggttttcaag

SEQ ID NO: 2432 - DNA, 25 bp, Homo sapiens
ccatgtctacagagggttttcaagg

SEQ ID NO: 2433 - DNA, 25 bp, Homo sapiens
catgtctacagagggttttcaaggc

SEQ ID NO: 2434 - DNA, 25 bp, Homo sapiens
atgtctacagagggttttcaaggcc

SEQ ID NO: 2435 - DNA, 25 bp, Homo sapiens
tgtctacagagggttttcaaggccc

SEQ ID NO: 2436 - DNA, 25 bp, Homo sapiens
gtctacagagggttttcaaggccca

SEQ ID NO: 2437 - DNA, 25 bp, Homo sapiens
tctacagagggttttcaaggcccac

SEQ ID NO: 2438 - DNA, 25 bp, Homo sapiens
ctacagagggttttcaaggcccaca

SEQ ID NO: 2439 - DNA, 25 bp, Homo sapiens
tacagagggttttcaaggcccacaa

SEQ ID NO: 2440 - DNA, 25 bp, Homo sapiens
acagagggttttcaaggcccacaaa

SEQ ID NO: 2441 - DNA, 25 bp, Homo sapiens
cagagggttttcaaggcccacaaag

SEQ ID NO: 2442 - DNA, 25 bp, Homo sapiens
agagggttttcaaggcccacaaaga

SEQ ID NO: 2443 - DNA, 25 bp, Homo sapiens
gagggttttcaaggcccacaaagag

SEQ ID NO: 2444 - DNA, 25 bp, Homo sapiens
agggttttcaaggcccacaaagagc

SEQ ID NO: 2445 - DNA, 25 bp, Homo sapiens
gggttttcaaggcccacaaagagct

SEQ ID NO: 2446 - DNA, 25 bp, Homo sapiens
ggttttcaaggcccacaaagagctg

SEQ ID NO: 2447 - DNA, 25 bp, Homo sapiens
gttttcaaggcccacaaagagctgc

SEQ ID NO: 2448 - DNA, 25 bp, Homo sapiens
ttttcaaggcccacaaagagctgcg

SEQ ID NO: 2449 - DNA, 25 bp, Homo sapiens
tttcaaggcccacaaagagctgcgg

SEQ ID NO: 2450 - DNA, 25 bp, Homo sapiens
ttcaaggcccacaaagagctgcggt

SEQ ID NO: 2451 - DNA, 25 bp, Homo sapiens
tcaaggcccacaaagagctgcggtg

SEQ ID NO: 2452 - DNA, 25 bp, Homo sapiens
caaggcccacaaagagctgcggtgc

SEQ ID NO: 2453 - DNA, 25 bp, Homo sapiens
aaggcccacaaagagctgcggtgcc

SEQ ID NO: 2454 - DNA, 25 bp, Homo sapiens
aggcccacaaagagctgcggtgccc

SEQ ID NO: 2455 - DNA, 25 bp, Homo sapiens
ggcccacaaagagctgcggtgcccc

SEQ ID NO: 2456 - DNA, 25 bp, Homo sapiens
gcccacaaagagctgcggtgccccg

SEQ ID NO: 2457 - DNA, 25 bp, Homo sapiens
cccacaaagagctgcggtgccccga

SEQ ID NO: 2458 - DNA, 25 bp, Homo sapiens
ccacaaagagctgcggtgccccgaa

SEQ ID NO: 2459 - DNA, 25 bp, Homo sapiens
cacaaagagctgcggtgccccgaat

SEQ ID NO: 2460 - DNA, 25 bp, Homo sapiens
acaaagagctgcggtgccccgaatg

SEQ ID NO: 2461 - DNA, 25 bp, Homo sapiens
caaagagctgcggtgccccgaatgc

SEQ ID NO: 2462 - DNA, 25 bp, Homo sapiens
aaagagctgcggtgccccgaatgca

SEQ ID NO: 2463 - DNA, 25 bp, Homo sapiens
aagagctgcggtgccccgaatgcag

SEQ ID NO: 2464 - DNA, 25 bp, Homo sapiens
agagctgcggtgccccgaatgcagg

SEQ ID NO: 2465 - DNA, 25 bp, Homo sapiens
gagctgcggtgccccgaatgcagga

SEQ ID NO: 2466 - DNA, 25 bp, Homo sapiens
agctgcggtgccccgaatgcaggac

SEQ ID NO: 2467 - DNA, 25 bp, Homo sapiens
gctgcggtgccccgaatgcaggacg

SEQ ID NO: 2468 - DNA, 25 bp, Homo sapiens
ctgcggtgccccgaatgcaggacgc

SEQ ID NO: 2469 - DNA, 25 bp, Homo sapiens
tgcggtgccccgaatgcaggacgcc

SEQ ID NO: 2470 - DNA, 25 bp, Homo sapiens
gcggtgccccgaatgcaggacgcct

SEQ ID NO: 2471 - DNA, 25 bp, Homo sapiens
cggtgccccgaatgcaggacgcctg

SEQ ID NO: 2472 - DNA, 25 bp, Homo sapiens
ggtgccccgaatgcaggacgcctgt

SEQ ID NO: 2473 - DNA, 25 bp, Homo sapiens
gtgccccgaatgcaggacgcctgtg

SEQ ID NO: 2474 - DNA, 25 bp, Homo sapiens
tgccccgaatgcaggacgcctgtgt

SEQ ID NO: 2475 - DNA, 25 bp, Homo sapiens
gccccgaatgcaggacgcctgtgtt

SEQ ID NO: 2476 - DNA, 25 bp, Homo sapiens
ccccgaatgcaggacgcctgtgttt

SEQ ID NO: 2477 - DNA, 25 bp, Homo sapiens
cccgaatgcaggacgcctgtgtttt

SEQ ID NO: 2478 - DNA, 25 bp, Homo sapiens
ccgaatgcaggacgcctgtgttttc

SEQ ID NO: 2479 - DNA, 25 bp, Homo sapiens
cgaatgcaggacgcctgtgttttcc

SEQ ID NO: 2480 - DNA, 25 bp, Homo sapiens
gaatgcaggacgcctgtgttttcca

SEQ ID NO: 2481 - DNA, 25 bp, Homo sapiens
aatgcaggacgcctgtgttttccaa

SEQ ID NO: 2482 - DNA, 25 bp, Homo sapiens
atgcaggacgcctgtgttttccaac

SEQ ID NO: 2483 - DNA, 25 bp, Homo sapiens
tgcaggacgcctgtgttttccaaca

SEQ ID NO: 2484 - DNA, 25 bp, Homo sapiens
gcaggacgcctgtgttttccaacat

SEQ ID NO: 2485 - DNA, 25 bp, Homo sapiens
caggacgcctgtgttttccaacatt

SEQ ID NO: 2486 - DNA, 25 bp, Homo sapiens
aggacgcctgtgttttccaacattg

SEQ ID NO: 2487 - DNA, 25 bp, Homo sapiens
ggacgcctgtgttttccaacattga

SEQ ID NO: 2488 - DNA, 25 bp, Homo sapiens
gacgcctgtgttttccaacattgag

SEQ ID NO: 2489 - DNA, 25 bp, Homo sapiens
acgcctgtgttttccaacattgagg

SEQ ID NO: 2490 - DNA, 25 bp, Homo sapiens
cgcctgtgttttccaacattgaggc

SEQ ID NO: 2491 - DNA, 25 bp, Homo sapiens
gcctgtgttttccaacattgaggcg

SEQ ID NO: 2492 - DNA, 25 bp, Homo sapiens
cctgtgttttccaacattgaggcgc

SEQ ID NO: 2493 - DNA, 25 bp, Homo sapiens
ctgtgttttccaacattgaggcgct

SEQ ID NO: 2494 - DNA, 25 bp, Homo sapiens
tgtgttttccaacattgaggcgctg

SEQ ID NO: 2495 - DNA, 25 bp, Homo sapiens
gtgttttccaacattgaggcgctgc

SEQ ID NO: 2496 - DNA, 25 bp, Homo sapiens
tgttttccaacattgaggcgctgcc

SEQ ID NO: 2497 - DNA, 25 bp, Homo sapiens
gttttccaacattgaggcgctgccg

SEQ ID NO: 2498 - DNA, 25 bp, Homo sapiens
ttttccaacattgaggcgctgccgg

SEQ ID NO: 2499 - DNA, 25 bp, Homo sapiens
tttccaacattgaggcgctgccggc

SEQ ID NO: 2500 - DNA, 25 bp, Homo sapiens
ttccaacattgaggcgctgccggcc

SEQ ID NO: 2501 - DNA, 25 bp, Homo sapiens
tccaacattgaggcgctgccggcca

SEQ ID NO: 2502 - DNA, 25 bp, Homo sapiens
ccaacattgaggcgctgccggccaa

SEQ ID NO: 2503 - DNA, 25 bp, Homo sapiens
caacattgaggcgctgccggccaac

SEQ ID NO: 2504 - DNA, 25 bp, Homo sapiens
aacattgaggcgctgccggccaacc

SEQ ID NO: 2505 - DNA, 25 bp, Homo sapiens
acattgaggcgctgccggccaacct

SEQ ID NO: 2506 - DNA, 25 bp, Homo sapiens
cattgaggcgctgccggccaacctg

SEQ ID NO: 2507 - DNA, 25 bp, Homo sapiens
attgaggcgctgccggccaacctgc

SEQ ID NO: 2508 - DNA, 25 bp, Homo sapiens
ttgaggcgctgccggccaacctgct

SEQ ID NO: 2509 - DNA, 25 bp, Homo sapiens
tgaggcgctgccggccaacctgctg

SEQ ID NO: 2510 - DNA, 25 bp, Homo sapiens
gaggcgctgccggccaacctgctgc

SEQ ID NO: 2511 - DNA, 25 bp, Homo sapiens
aggcgctgccggccaacctgctgct

SEQ ID NO: 2512 - DNA, 25 bp, Homo sapiens
ggcgctgccggccaacctgctgctc

SEQ ID NO: 2513 - DNA, 25 bp, Homo sapiens
gcgctgccggccaacctgctgctcg

SEQ ID NO: 2514 - DNA, 25 bp, Homo sapiens
cgctgccggccaacctgctgctcgt

SEQ ID NO: 2515 - DNA, 25 bp, Homo sapiens
gctgccggccaacctgctgctcgtg

SEQ ID NO: 2516 - DNA, 25 bp, Homo sapiens
ctgccggccaacctgctgctcgtgc

SEQ ID NO: 2517 - DNA, 25 bp, Homo sapiens
tgccggccaacctgctgctcgtgcg

SEQ ID NO: 2518 - DNA, 25 bp, Homo sapiens
gccggccaacctgctgctcgtgcgc

SEQ ID NO: 2519 - DNA, 25 bp, Homo sapiens
ccggccaacctgctgctcgtgcgcc

SEQ ID NO: 2520 - DNA, 25 bp, Homo sapiens
cggccaacctgctgctcgtgcgcct

SEQ ID NO: 2521 - DNA, 25 bp, Homo sapiens
ggccaacctgctgctcgtgcgcctt

SEQ ID NO: 2522 - DNA, 25 bp, Homo sapiens
gccaacctgctgctcgtgcgccttc

SEQ ID NO: 2523 - DNA, 25 bp, Homo sapiens
ccaacctgctgctcgtgcgccttct

SEQ ID NO: 2524 - DNA, 25 bp, Homo sapiens
caacctgctgctcgtgcgccttctg

SEQ ID NO: 2525 - DNA, 25 bp, Homo sapiens
aacctgctgctcgtgcgccttctgg

SEQ ID NO: 2526 - DNA, 25 bp, Homo sapiens
acctgctgctcgtgcgccttctgga

SEQ ID NO: 2527 - DNA, 25 bp, Homo sapiens
cctgctgctcgtgcgccttctggat

SEQ ID NO: 2528 - DNA, 25 bp, Homo sapiens
ctgctgctcgtgcgccttctggatg

SEQ ID NO: 2529 - DNA, 25 bp, Homo sapiens
tgctgctcgtgcgccttctggatgg

SEQ ID NO: 2530 - DNA, 25 bp, Homo sapiens
gctgctcgtgcgccttctggatgga

SEQ ID NO: 2531 - DNA, 25 bp, Homo sapiens
ctgctcgtgcgccttctggatggag

SEQ ID NO: 2532 - DNA, 25 bp, Homo sapiens
tgctcgtgcgccttctggatggagt

SEQ ID NO: 2533 - DNA, 25 bp, Homo sapiens
gctcgtgcgccttctggatggagtg

SEQ ID NO: 2534 - DNA, 25 bp, Homo sapiens
ctcgtgcgccttctggatggagtgc

SEQ ID NO: 2535 - DNA, 25 bp, Homo sapiens
tcgtgcgccttctggatggagtgcg

SEQ ID NO: 2536 - DNA, 25 bp, Homo sapiens
cgtgcgccttctggatggagtgcgc

SEQ ID NO: 2537 - DNA, 25 bp, Homo sapiens
gtgcgccttctggatggagtgcgct

SEQ ID NO: 2538 - DNA, 25 bp, Homo sapiens
tgcgccttctggatggagtgcgctc

SEQ ID NO: 2539 - DNA, 25 bp, Homo sapiens
gcgccttctggatggagtgcgctca

SEQ ID NO: 2540 - DNA, 25 bp, Homo sapiens
cgccttctggatggagtgcgctcag

SEQ ID NO: 2541 - DNA, 25 bp, Homo sapiens
gccttctggatggagtgcgctcagg

SEQ ID NO: 2542 - DNA, 25 bp, Homo sapiens
ccttctggatggagtgcgctcaggg

SEQ ID NO: 2543 - DNA, 25 bp, Homo sapiens
cttctggatggagtgcgctcagggc

SEQ ID NO: 2544 - DNA, 25 bp, Homo sapiens
ttctggatggagtgcgctcagggca

SEQ ID NO: 2545 - DNA, 25 bp, Homo sapiens
tctggatggagtgcgctcagggcag

SEQ ID NO: 2546 - DNA, 25 bp, Homo sapiens
ctggatggagtgcgctcagggcaga

SEQ ID NO: 2547 - DNA, 25 bp, Homo sapiens
tggatggagtgcgctcagggcagag

SEQ ID NO: 2548 - DNA, 25 bp, Homo sapiens
ggatggagtgcgctcagggcagagc

SEQ ID NO: 2549 - DNA, 25 bp, Homo sapiens
gatggagtgcgctcagggcagagct

SEQ ID NO: 2550 - DNA, 25 bp, Homo sapiens
atggagtgcgctcagggcagagctc

SEQ ID NO: 2551 - DNA, 25 bp, Homo sapiens
tggagtgcgctcagggcagagctcc

SEQ ID NO: 2552 - DNA, 25 bp, Homo sapiens
ggagtgcgctcagggcagagctccg

SEQ ID NO: 2553 - DNA, 25 bp, Homo sapiens
gagtgcgctcagggcagagctccgg

SEQ ID NO: 2554 - DNA, 25 bp, Homo sapiens
agtgcgctcagggcagagctccggg

SEQ ID NO: 2555 - DNA, 25 bp, Homo sapiens
gtgcgctcagggcagagctccggga

SEQ ID NO: 2556 - DNA, 25 bp, Homo sapiens
tgcgctcagggcagagctccgggag

SEQ ID NO: 2557 - DNA, 25 bp, Homo sapiens
gcgctcagggcagagctccgggaga

SEQ ID NO: 2558 - DNA, 25 bp, Homo sapiens
cgctcagggcagagctccgggagag

SEQ ID NO: 2559 - DNA, 25 bp, Homo sapiens
gctcagggcagagctccgggagagg

SEQ ID NO: 2560 - DNA, 25 bp, Homo sapiens
ctcagggcagagctccgggagaggg

SEQ ID NO: 2561 - DNA, 25 bp, Homo sapiens
tcagggcagagctccgggagagggg

SEQ ID NO: 2562 - DNA, 25 bp, Homo sapiens
cagggcagagctccgggagaggggg

SEQ ID NO: 2563 - DNA, 25 bp, Homo sapiens
agggcagagctccgggagagggggc

SEQ ID NO: 2564 - DNA, 25 bp, Homo sapiens
gggcagagctccgggagagggggct

SEQ ID NO: 2565 - DNA, 25 bp, Homo sapiens
ggcagagctccgggagagggggctc

SEQ ID NO: 2566 - DNA, 25 bp, Homo sapiens
gcagagctccgggagagggggctcc

SEQ ID NO: 2567 - DNA, 25 bp, Homo sapiens
cagagctccgggagagggggctcct

SEQ ID NO: 2568 - DNA, 25 bp, Homo sapiens
agagctccgggagagggggctcctt

SEQ ID NO: 2569 - DNA, 25 bp, Homo sapiens
gagctccgggagagggggctccttc

SEQ ID NO: 2570 - DNA, 25 bp, Homo sapiens
agctccgggagagggggctccttcc

SEQ ID NO: 2571 - DNA, 25 bp, Homo sapiens
gctccgggagagggggctccttccg

SEQ ID NO: 2572 - DNA, 25 bp, Homo sapiens
ctccgggagagggggctccttccgc

SEQ ID NO: 2573 - DNA, 25 bp, Homo sapiens
tccgggagagggggctccttccgca

SEQ ID NO: 2574 - DNA, 25 bp, Homo sapiens
ccgggagagggggctccttccgcag

SEQ ID NO: 2575 - DNA, 25 bp, Homo sapiens
cgggagagggggctccttccgcagg

SEQ ID NO: 2576 - DNA, 25 bp, Homo sapiens
gggagagggggctccttccgcaggc

SEQ ID NO: 2577 - DNA, 25 bp, Homo sapiens
ggagagggggctccttccgcaggcc

SEQ ID NO: 2578 - DNA, 25 bp, Homo sapiens
gagagggggctccttccgcaggcct

SEQ ID NO: 2579 - DNA, 25 bp, Homo sapiens
agagggggctccttccgcaggcctg

SEQ ID NO: 2580 - DNA, 25 bp, Homo sapiens
gagggggctccttccgcaggcctgg

SEQ ID NO: 2581 - DNA, 25 bp, Homo sapiens
agggggctccttccgcaggcctggc

SEQ ID NO: 2582 - DNA, 25 bp, Homo sapiens
gggggctccttccgcaggcctggca

SEQ ID NO: 2583 - DNA, 25 bp, Homo sapiens
ggggctccttccgcaggcctggcac

SEQ ID NO: 2584 - DNA, 25 bp, Homo sapiens
gggctccttccgcaggcctggcacg

SEQ ID NO: 2585 - DNA, 25 bp, Homo sapiens
ggctccttccgcaggcctggcacga

SEQ ID NO: 2586 - DNA, 25 bp, Homo sapiens
gctccttccgcaggcctggcacgat

SEQ ID NO: 2587 - DNA, 25 bp, Homo sapiens
ctccttccgcaggcctggcacgatg

SEQ ID NO: 2588 - DNA, 25 bp, Homo sapiens
tccttccgcaggcctggcacgatga

SEQ ID NO: 2589 - DNA, 25 bp, Homo sapiens
ccttccgcaggcctggcacgatgac

SEQ ID NO: 2590 - DNA, 25 bp, Homo sapiens
cttccgcaggcctggcacgatgacc

SEQ ID NO: 2591 - DNA, 25 bp, Homo sapiens
ttccgcaggcctggcacgatgacct

SEQ ID NO: 2592 - DNA, 25 bp, Homo sapiens
tccgcaggcctggcacgatgacctt

SEQ ID NO: 2593 - DNA, 25 bp, Homo sapiens
ccgcaggcctggcacgatgaccttg

SEQ ID NO: 2594 - DNA, 25 bp, Homo sapiens
cgcaggcctggcacgatgaccttgc

SEQ ID NO: 2595 - DNA, 25 bp, Homo sapiens
gcaggcctggcacgatgaccttgca

SEQ ID NO: 2596 - DNA, 25 bp, Homo sapiens
caggcctggcacgatgaccttgcag

SEQ ID NO: 2597 - DNA, 25 bp, Homo sapiens
aggcctggcacgatgaccttgcagg

SEQ ID NO: 2598 - DNA, 25 bp, Homo sapiens
ggcctggcacgatgaccttgcagga

SEQ ID NO: 2599 - DNA, 25 bp, Homo sapiens
gcctggcacgatgaccttgcaggat

SEQ ID NO: 2600 - DNA, 25 bp, Homo sapiens
cctggcacgatgaccttgcaggatg

SEQ ID NO: 2601 - DNA, 25 bp, Homo sapiens
ctggcacgatgaccttgcaggatgg

SEQ ID NO: 2602 - DNA, 25 bp, Homo sapiens
tggcacgatgaccttgcaggatggc

SEQ ID NO: 2603 - DNA, 25 bp, Homo sapiens
ggcacgatgaccttgcaggatggca

SEQ ID NO: 2604 - DNA, 25 bp, Homo sapiens
gcacgatgaccttgcaggatggcag

SEQ ID NO: 2605 - DNA, 25 bp, Homo sapiens
cacgatgaccttgcaggatggcagg

SEQ ID NO: 2606 - DNA, 25 bp, Homo sapiens
acgatgaccttgcaggatggcagga

SEQ ID NO: 2607 - DNA, 25 bp, Homo sapiens
cgatgaccttgcaggatggcaggaa

SEQ ID NO: 2608 - DNA, 25 bp, Homo sapiens
gatgaccttgcaggatggcaggaaa

SEQ ID NO: 2609 - DNA, 25 bp, Homo sapiens
atgaccttgcaggatggcaggaaaa

SEQ ID NO: 2610 - DNA, 25 bp, Homo sapiens
tgaccttgcaggatggcaggaaaag

SEQ ID NO: 2611 - DNA, 25 bp, Homo sapiens
gaccttgcaggatggcaggaaaagc

SEQ ID NO: 2612 - DNA, 25 bp, Homo sapiens
accttgcaggatggcaggaaaagca

SEQ ID NO: 2613 - DNA, 25 bp, Homo sapiens
ccttgcaggatggcaggaaaagcag

SEQ ID NO: 2614 - DNA, 25 bp, Homo sapiens
cttgcaggatggcaggaaaagcagg

SEQ ID NO: 2615 - DNA, 25 bp, Homo sapiens
ttgcaggatggcaggaaaagcagga

SEQ ID NO: 2616 - DNA, 25 bp, Homo sapiens
tgcaggatggcaggaaaagcaggac

SEQ ID NO: 2617 - DNA, 25 bp, Homo sapiens
gcaggatggcaggaaaagcaggacc

SEQ ID NO: 2618 - DNA, 25 bp, Homo sapiens
caggatggcaggaaaagcaggacca

SEQ ID NO: 2619 - DNA, 25 bp, Homo sapiens
aggatggcaggaaaagcaggaccaa

SEQ ID NO: 2620 - DNA, 25 bp, Homo sapiens
ggatggcaggaaaagcaggaccaac

SEQ ID NO: 2621 - DNA, 25 bp, Homo sapiens
gatggcaggaaaagcaggaccaacc

SEQ ID NO: 2622 - DNA, 25 bp, Homo sapiens
atggcaggaaaagcaggaccaaccc

SEQ ID NO: 2623 - DNA, 25 bp, Homo sapiens
tggcaggaaaagcaggaccaacccc

SEQ ID NO: 2624 - DNA, 25 bp, Homo sapiens
ggcaggaaaagcaggaccaacccca

SEQ ID NO: 2625 - DNA, 25 bp, Homo sapiens
gcaggaaaagcaggaccaaccccag

SEQ ID NO: 2626 - DNA, 25 bp, Homo sapiens
caggaaaagcaggaccaaccccaga

SEQ ID NO: 2627 - DNA, 25 bp, Homo sapiens
aggaaaagcaggaccaaccccagac

SEQ ID NO: 2628 - DNA, 25 bp, Homo sapiens
ggaaaagcaggaccaaccccagacg

SEQ ID NO: 2629 - DNA, 25 bp, Homo sapiens
gaaaagcaggaccaaccccagacgt

SEQ ID NO: 2630 - DNA, 25 bp, Homo sapiens
aaaagcaggaccaaccccagacgtc

SEQ ID NO: 2631 - DNA, 25 bp, Homo sapiens
aaagcaggaccaaccccagacgtct

SEQ ID NO: 2632 - DNA, 25 bp, Homo sapiens
aagcaggaccaaccccagacgtctg

SEQ ID NO: 2633 - DNA, 25 bp, Homo sapiens
agcaggaccaaccccagacgtctgc

SEQ ID NO: 2634 - DNA, 25 bp, Homo sapiens
gcaggaccaaccccagacgtctgca

SEQ ID NO: 2635 - DNA, 25 bp, Homo sapiens
caggaccaaccccagacgtctgcag

SEQ ID NO: 2636 - DNA, 25 bp, Homo sapiens
aggaccaaccccagacgtctgcagg

SEQ ID NO: 2637 - DNA, 25 bp, Homo sapiens
ggaccaaccccagacgtctgcaggc

SEQ ID NO: 2638 - DNA, 25 bp, Homo sapiens
gaccaaccccagacgtctgcaggcc

SEQ ID NO: 2639 - DNA, 25 bp, Homo sapiens
accaaccccagacgtctgcaggcca

SEQ ID NO: 2640 - DNA, 25 bp, Homo sapiens
ccaaccccagacgtctgcaggccag

SEQ ID NO: 2641 - DNA, 25 bp, Homo sapiens
caaccccagacgtctgcaggccagt

SEQ ID NO: 2642 - DNA, 25 bp, Homo sapiens
aaccccagacgtctgcaggccagtc

SEQ ID NO: 2643 - DNA, 25 bp, Homo sapiens
accccagacgtctgcaggccagtcc

SEQ ID NO: 2644 - DNA, 25 bp, Homo sapiens
ccccagacgtctgcaggccagtcct

SEQ ID NO: 2645 - DNA, 25 bp, Homo sapiens
cccagacgtctgcaggccagtcctt

SEQ ID NO: 2646 - DNA, 25 bp, Homo sapiens
ccagacgtctgcaggccagtccttt

SEQ ID NO: 2647 - DNA, 25 bp, Homo sapiens
cagacgtctgcaggccagtcctttc

SEQ ID NO: 2648 - DNA, 25 bp, Homo sapiens
agacgtctgcaggccagtcctttcc

SEQ ID NO: 2649 - DNA, 25 bp, Homo sapiens
gacgtctgcaggccagtcctttccg

SEQ ID NO: 2650 - DNA, 25 bp, Homo sapiens
acgtctgcaggccagtcctttccgg

SEQ ID NO: 2651 - DNA, 25 bp, Homo sapiens
cgtctgcaggccagtcctttccggc

SEQ ID NO: 2652 - DNA, 25 bp, Homo sapiens
gtctgcaggccagtcctttccggct

SEQ ID NO: 2653 - DNA, 25 bp, Homo sapiens
tctgcaggccagtcctttccggcta

SEQ ID NO: 2654 - DNA, 25 bp, Homo sapiens
ctgcaggccagtcctttccggctag

SEQ ID NO: 2655 - DNA, 25 bp, Homo sapiens
tgcaggccagtcctttccggctagt

SEQ ID NO: 2656 - DNA, 25 bp, Homo sapiens
gcaggccagtcctttccggctagtg

SEQ ID NO: 2657 - DNA, 25 bp, Homo sapiens
caggccagtcctttccggctagtgc

SEQ ID NO: 2658 - DNA, 25 bp, Homo sapiens
aggccagtcctttccggctagtgcc

SEQ ID NO: 2659 - DNA, 25 bp, Homo sapiens
ggccagtcctttccggctagtgcct

SEQ ID NO: 2660 - DNA, 25 bp, Homo sapiens
gccagtcctttccggctagtgccta

SEQ ID NO: 2661 - DNA, 25 bp, Homo sapiens
ccagtcctttccggctagtgcctaa

SEQ ID NO: 2662 - DNA, 25 bp, Homo sapiens
cagtcctttccggctagtgcctaat

SEQ ID NO: 2663 - DNA, 25 bp, Homo sapiens
agtcctttccggctagtgcctaatg

SEQ ID NO: 2664 - DNA, 25 bp, Homo sapiens
gtcctttccggctagtgcctaatgt

SEQ ID NO: 2665 - DNA, 25 bp, Homo sapiens
tcctttccggctagtgcctaatgtc

SEQ ID NO: 2666 - DNA, 25 bp, Homo sapiens
cctttccggctagtgcctaatgtca

SEQ ID NO: 2667 - DNA, 25 bp, Homo sapiens
ctttccggctagtgcctaatgtcag

SEQ ID NO: 2668 - DNA, 25 bp, Homo sapiens
tttccggctagtgcctaatgtcaga

SEQ ID NO: 2669 - DNA, 25 bp, Homo sapiens
ttccggctagtgcctaatgtcagaa

SEQ ID NO: 2670 - DNA, 25 bp, Homo sapiens
tccggctagtgcctaatgtcagaat

SEQ ID NO: 2671 - DNA, 25 bp, Homo sapiens
ccggctagtgcctaatgtcagaatc

SEQ ID NO: 2672 - DNA, 25 bp, Homo sapiens
cggctagtgcctaatgtcagaatcc

SEQ ID NO: 2673 - DNA, 25 bp, Homo sapiens
ggctagtgcctaatgtcagaatcca

SEQ ID NO: 2674 - DNA, 25 bp, Homo sapiens
gctagtgcctaatgtcagaatccac

SEQ ID NO: 2675 - DNA, 25 bp, Homo sapiens
ctagtgcctaatgtcagaatccaca

SEQ ID NO: 2676 - DNA, 25 bp, Homo sapiens
tagtgcctaatgtcagaatccacat

SEQ ID NO: 2677 - DNA, 25 bp, Homo sapiens
agtgcctaatgtcagaatccacatg

SEQ ID NO: 2678 - DNA, 25 bp, Homo sapiens
gtgcctaatgtcagaatccacatgg

SEQ ID NO: 2679 - DNA, 25 bp, Homo sapiens
tgcctaatgtcagaatccacatgga

SEQ ID NO: 2680 - DNA, 25 bp, Homo sapiens
gcctaatgtcagaatccacatggat

SEQ ID NO: 2681 - DNA, 25 bp, Homo sapiens
cctaatgtcagaatccacatggatg

SEQ ID NO: 2682 - DNA, 25 bp, Homo sapiens
ctaatgtcagaatccacatggatgg

SEQ ID NO: 2683 - DNA, 25 bp, Homo sapiens
taatgtcagaatccacatggatggg

SEQ ID NO: 2684 - DNA, 25 bp, Homo sapiens
aatgtcagaatccacatggatgggg

SEQ ID NO: 2685 - DNA, 25 bp, Homo sapiens
atgtcagaatccacatggatggggt

SEQ ID NO: 2686 - DNA, 25 bp, Homo sapiens
tgtcagaatccacatggatggggtg

SEQ ID NO: 2687 - DNA, 25 bp, Homo sapiens
gtcagaatccacatggatggggtgc

SEQ ID NO: 2688 - DNA, 25 bp, Homo sapiens
tcagaatccacatggatggggtgcc

SEQ ID NO: 2689 - DNA, 25 bp, Homo sapiens
cagaatccacatggatggggtgcct

SEQ ID NO: 2690 - DNA, 25 bp, Homo sapiens
agaatccacatggatggggtgcctc

SEQ ID NO: 2691 - DNA, 25 bp, Homo sapiens
gaatccacatggatggggtgcctcg

SEQ ID NO: 2692 - DNA, 25 bp, Homo sapiens
aatccacatggatggggtgcctcga

SEQ ID NO: 2693 - DNA, 25 bp, Homo sapiens
atccacatggatggggtgcctcgag

SEQ ID NO: 2694 - DNA, 25 bp, Homo sapiens
tccacatggatggggtgcctcgagc

SEQ ID NO: 2695 - DNA, 25 bp, Homo sapiens
ccacatggatggggtgcctcgagca

SEQ ID NO: 2696 - DNA, 25 bp, Homo sapiens
cacatggatggggtgcctcgagcaa

SEQ ID NO: 2697 - DNA, 25 bp, Homo sapiens
acatggatggggtgcctcgagcaaa

SEQ ID NO: 2698 - DNA, 25 bp, Homo sapiens
catggatggggtgcctcgagcaaag

SEQ ID NO: 2699 - DNA, 25 bp, Homo sapiens
atggatggggtgcctcgagcaaagg

SEQ ID NO: 2700 - DNA, 25 bp, Homo sapiens
tggatggggtgcctcgagcaaaggc

SEQ ID NO: 2701 - DNA, 25 bp, Homo sapiens
ggatggggtgcctcgagcaaaggcc

SEQ ID NO: 2702 - DNA, 25 bp, Homo sapiens
gatggggtgcctcgagcaaaggcct

SEQ ID NO: 2703 - DNA, 25 bp, Homo sapiens
atggggtgcctcgagcaaaggcctt

SEQ ID NO: 2704 - DNA, 25 bp, Homo sapiens
tggggtgcctcgagcaaaggcctta

SEQ ID NO: 2705 - DNA, 25 bp, Homo sapiens
ggggtgcctcgagcaaaggccttat

SEQ ID NO: 2706 - DNA, 25 bp, Homo sapiens
gggtgcctcgagcaaaggccttatg

SEQ ID NO: 2707 - DNA, 25 bp, Homo sapiens
ggtgcctcgagcaaaggccttatgc

SEQ ID NO: 2708 - DNA, 25 bp, Homo sapiens
gtgcctcgagcaaaggccttatgca

SEQ ID NO: 2709 - DNA, 25 bp, Homo sapiens
tgcctcgagcaaaggccttatgcaa

SEQ ID NO: 2710 - DNA, 25 bp, Homo sapiens
gcctcgagcaaaggccttatgcaac

SEQ ID NO: 2711 - DNA, 25 bp, Homo sapiens
cctcgagcaaaggccttatgcaact

SEQ ID NO: 2712 - DNA, 25 bp, Homo sapiens
ctcgagcaaaggccttatgcaacta

SEQ ID NO: 2713 - DNA, 25 bp, Homo sapiens
tcgagcaaaggccttatgcaactac

SEQ ID NO: 2714 - DNA, 25 bp, Homo sapiens
cgagcaaaggccttatgcaactaca

SEQ ID NO: 2715 - DNA, 25 bp, Homo sapiens
gagcaaaggccttatgcaactacag

SEQ ID NO: 2716 - DNA, 25 bp, Homo sapiens
agcaaaggccttatgcaactacaga

SEQ ID NO: 2717 - DNA, 25 bp, Homo sapiens
gcaaaggccttatgcaactacagag

SEQ ID NO: 2718 - DNA, 25 bp, Homo sapiens
caaaggccttatgcaactacagagg

SEQ ID NO: 2719 - DNA, 25 bp, Homo sapiens
aaaggccttatgcaactacagaggg

SEQ ID NO: 2720 - DNA, 25 bp, Homo sapiens
aaggccttatgcaactacagagggc

SEQ ID NO: 2721 - DNA, 25 bp, Homo sapiens
aggccttatgcaactacagagggca

SEQ ID NO: 2722 - DNA, 25 bp, Homo sapiens
ggccttatgcaactacagagggcag

SEQ ID NO: 2723 - DNA, 25 bp, Homo sapiens
gccttatgcaactacagagggcaga

SEQ ID NO: 2724 - DNA, 25 bp, Homo sapiens
ccttatgcaactacagagggcagaa

SEQ ID NO: 2725 - DNA, 25 bp, Homo sapiens
cttatgcaactacagagggcagaat

SEQ ID NO: 2726 - DNA, 25 bp, Homo sapiens
ttatgcaactacagagggcagaatc

SEQ ID NO: 2727 - DNA, 25 bp, Homo sapiens
tatgcaactacagagggcagaatcc

SEQ ID NO: 2728 - DNA, 25 bp, Homo sapiens
atgcaactacagagggcagaatccc

SEQ ID NO: 2729 - DNA, 25 bp, Homo sapiens
tgcaactacagagggcagaatcccg

SEQ ID NO: 2730 - DNA, 25 bp, Homo sapiens
gcaactacagagggcagaatcccgg

SEQ ID NO: 2731 - DNA, 25 bp, Homo sapiens
caactacagagggcagaatcccggt

SEQ ID NO: 2732 - DNA, 25 bp, Homo sapiens
aactacagagggcagaatcccggtg

SEQ ID NO: 2733 - DNA, 25 bp, Homo sapiens
actacagagggcagaatcccggtga

SEQ ID NO: 2734 - DNA, 25 bp, Homo sapiens
ctacagagggcagaatcccggtgac

SEQ ID NO: 2735 - DNA, 25 bp, Homo sapiens
tacagagggcagaatcccggtgacc

SEQ ID NO: 2736 - DNA, 25 bp, Homo sapiens
acagagggcagaatcccggtgacct

SEQ ID NO: 2737 - DNA, 25 bp, Homo sapiens
cagagggcagaatcccggtgaccta

SEQ ID NO: 2738 - DNA, 25 bp, Homo sapiens
agagggcagaatcccggtgacctaa

SEQ ID NO: 2739 - DNA, 25 bp, Homo sapiens
gagggcagaatcccggtgacctaag

SEQ ID NO: 2740 - DNA, 25 bp, Homo sapiens
agggcagaatcccggtgacctaagg

SEQ ID NO: 2741 - DNA, 25 bp, Homo sapiens
gggcagaatcccggtgacctaaggt

SEQ ID NO: 2742 - DNA, 25 bp, Homo sapiens
ggcagaatcccggtgacctaaggtt

SEQ ID NO: 2743 - DNA, 25 bp, Homo sapiens
gcagaatcccggtgacctaaggttt

SEQ ID NO: 2744 - DNA, 25 bp, Homo sapiens
cagaatcccggtgacctaaggttta

SEQ ID NO: 2745 - DNA, 25 bp, Homo sapiens
agaatcccggtgacctaaggtttaa

SEQ ID NO: 2746 - DNA, 25 bp, Homo sapiens
gaatcccggtgacctaaggtttaat

SEQ ID NO: 2747 - DNA, 25 bp, Homo sapiens
aatcccggtgacctaaggtttaata

SEQ ID NO: 2748 - DNA, 25 bp, Homo sapiens
atcccggtgacctaaggtttaataa

SEQ ID NO: 2749 - DNA, 25 bp, Homo sapiens
tcccggtgacctaaggtttaataag

SEQ ID NO: 2750 - DNA, 25 bp, Homo sapiens
cccggtgacctaaggtttaataagg

SEQ ID NO: 2751 - DNA, 25 bp, Homo sapiens
ccggtgacctaaggtttaataaggg

SEQ ID NO: 2752 - DNA, 25 bp, Homo sapiens
cggtgacctaaggtttaataaggga

SEQ ID NO: 2753 - DNA, 25 bp, Homo sapiens
ggtgacctaaggtttaataagggag

SEQ ID NO: 2754 - DNA, 25 bp, Homo sapiens
gtgacctaaggtttaataagggaga

SEQ ID NO: 2755 - DNA, 25 bp, Homo sapiens
tgacctaaggtttaataagggagat

SEQ ID NO: 2756 - DNA, 25 bp, Homo sapiens
gacctaaggtttaataagggagata

SEQ ID NO: 2757 - DNA, 25 bp, Homo sapiens
acctaaggtttaataagggagatat

SEQ ID NO: 2758 - DNA, 25 bp, Homo sapiens
cctaaggtttaataagggagatatc

SEQ ID NO: 2759 - DNA, 25 bp, Homo sapiens
ctaaggtttaataagggagatatca

SEQ ID NO: 2760 - DNA, 25 bp, Homo sapiens
taaggtttaataagggagatatcat

SEQ ID NO: 2761 - DNA, 25 bp, Homo sapiens
aaggtttaataagggagatatcatc

SEQ ID NO: 2762 - DNA, 25 bp, Homo sapiens
aggtttaataagggagatatcatcc

SEQ ID NO: 2763 - DNA, 25 bp, Homo sapiens
ggtttaataagggagatatcatcct

SEQ ID NO: 2764 - DNA, 25 bp, Homo sapiens
gtttaataagggagatatcatcctt

SEQ ID NO: 2765 - DNA, 25 bp, Homo sapiens
tttaataagggagatatcatccttc

SEQ ID NO: 2766 - DNA, 25 bp, Homo sapiens
ttaataagggagatatcatccttct

SEQ ID NO: 2767 - DNA, 25 bp, Homo sapiens
taataagggagatatcatccttctc

SEQ ID NO: 2768 - DNA, 25 bp, Homo sapiens
aataagggagatatcatccttctcc

SEQ ID NO: 2769 - DNA, 25 bp, Homo sapiens
ataagggagatatcatccttctccg

SEQ ID NO: 2770 - DNA, 25 bp, Homo sapiens
taagggagatatcatccttctccgg

SEQ ID NO: 2771 - DNA, 25 bp, Homo sapiens
aagggagatatcatccttctccgga

SEQ ID NO: 2772 - DNA, 25 bp, Homo sapiens
agggagatatcatccttctccggag

SEQ ID NO: 2773 - DNA, 25 bp, Homo sapiens
gggagatatcatccttctccggaga

SEQ ID NO: 2774 - DNA, 25 bp, Homo sapiens
ggagatatcatccttctccggagac

SEQ ID NO: 2775 - DNA, 25 bp, Homo sapiens
gagatatcatccttctccggagaca

SEQ ID NO: 2776 - DNA, 25 bp, Homo sapiens
agatatcatccttctccggagacag

SEQ ID NO: 2777 - DNA, 25 bp, Homo sapiens
gatatcatccttctccggagacagc

SEQ ID NO: 2778 - DNA, 25 bp, Homo sapiens
atatcatccttctccggagacagct

SEQ ID NO: 2779 - DNA, 25 bp, Homo sapiens
tatcatccttctccggagacagctt

SEQ ID NO: 2780 - DNA, 25 bp, Homo sapiens
atcatccttctccggagacagcttg

SEQ ID NO: 2781 - DNA, 25 bp, Homo sapiens
tcatccttctccggagacagcttga

SEQ ID NO: 2782 - DNA, 25 bp, Homo sapiens
catccttctccggagacagcttgat

SEQ ID NO: 2783 - DNA, 25 bp, Homo sapiens
atccttctccggagacagcttgatg

SEQ ID NO: 2784 - DNA, 25 bp, Homo sapiens
tccttctccggagacagcttgatga

SEQ ID NO: 2785 - DNA, 25 bp, Homo sapiens
ccttctccggagacagcttgatgag

SEQ ID NO: 2786 - DNA, 25 bp, Homo sapiens
cttctccggagacagcttgatgaga

SEQ ID NO: 2787 - DNA, 25 bp, Homo sapiens
ttctccggagacagcttgatgagaa

SEQ ID NO: 2788 - DNA, 25 bp, Homo sapiens
tctccggagacagcttgatgagaat

SEQ ID NO: 2789 - DNA, 25 bp, Homo sapiens
ctccggagacagcttgatgagaatt

SEQ ID NO: 2790 - DNA, 25 bp, Homo sapiens
tccggagacagcttgatgagaattg

SEQ ID NO: 2791 - DNA, 25 bp, Homo sapiens
ccggagacagcttgatgagaattgg

SEQ ID NO: 2792 - DNA, 25 bp, Homo sapiens
cggagacagcttgatgagaattggt

SEQ ID NO: 2793 - DNA, 25 bp, Homo sapiens
ggagacagcttgatgagaattggta

SEQ ID NO: 2794 - DNA, 25 bp, Homo sapiens
gagacagcttgatgagaattggtac

SEQ ID NO: 2795 - DNA, 25 bp, Homo sapiens
agacagcttgatgagaattggtacc

SEQ ID NO: 2796 - DNA, 25 bp, Homo sapiens
gacagcttgatgagaattggtacca

SEQ ID NO: 2797 - DNA, 25 bp, Homo sapiens
acagcttgatgagaattggtaccag

SEQ ID NO: 2798 - DNA, 25 bp, Homo sapiens
cagcttgatgagaattggtaccagg

SEQ ID NO: 2799 - DNA, 25 bp, Homo sapiens
agcttgatgagaattggtaccaggg

SEQ ID NO: 2800 - DNA, 25 bp, Homo sapiens
gcttgatgagaattggtaccagggg

SEQ ID NO: 2801 - DNA, 25 bp, Homo sapiens
cttgatgagaattggtaccaggggg

SEQ ID NO: 2802 - DNA, 25 bp, Homo sapiens
ttgatgagaattggtaccaggggga

SEQ ID NO: 2803 - DNA, 25 bp, Homo sapiens
tgatgagaattggtaccagggggaa

SEQ ID NO: 2804 - DNA, 25 bp, Homo sapiens
gatgagaattggtaccagggggaaa

SEQ ID NO: 2805 - DNA, 25 bp, Homo sapiens
atgagaattggtaccagggggaaat

SEQ ID NO: 2806 - DNA, 25 bp, Homo sapiens
tgagaattggtaccagggggaaatc

SEQ ID NO: 2807 - DNA, 25 bp, Homo sapiens
gagaattggtaccagggggaaatca

SEQ ID NO: 2808 - DNA, 25 bp, Homo sapiens
agaattggtaccagggggaaatcaa

SEQ ID NO: 2809 - DNA, 25 bp, Homo sapiens
gaattggtaccagggggaaatcaat

SEQ ID NO: 2810 - DNA, 25 bp, Homo sapiens
aattggtaccagggggaaatcaatg

SEQ ID NO: 2811 - DNA, 25 bp, Homo sapiens
attggtaccagggggaaatcaatgg

SEQ ID NO: 2812 - DNA, 25 bp, Homo sapiens
ttggtaccagggggaaatcaatggc

SEQ ID NO: 2813 - DNA, 25 bp, Homo sapiens
tggtaccagggggaaatcaatggca

SEQ ID NO: 2814 - DNA, 25 bp, Homo sapiens
ggtaccagggggaaatcaatggcat

SEQ ID NO: 2815 - DNA, 25 bp, Homo sapiens
gtaccagggggaaatcaatggcatc

SEQ ID NO: 2816 - DNA, 25 bp, Homo sapiens
taccagggggaaatcaatggcatca

SEQ ID NO: 2817 - DNA, 25 bp, Homo sapiens
accagggggaaatcaatggcatcag

SEQ ID NO: 2818 - DNA, 25 bp, Homo sapiens
ccagggggaaatcaatggcatcagc

SEQ ID NO: 2819 - DNA, 25 bp, Homo sapiens
cagggggaaatcaatggcatcagcg

SEQ ID NO: 2820 - DNA, 25 bp, Homo sapiens
agggggaaatcaatggcatcagcgg

SEQ ID NO: 2821 - DNA, 25 bp, Homo sapiens
gggggaaatcaatggcatcagcggg

SEQ ID NO: 2822 - DNA, 25 bp, Homo sapiens
ggggaaatcaatggcatcagcggga

SEQ ID NO: 2823 - DNA, 25 bp, Homo sapiens
gggaaatcaatggcatcagcgggaa

SEQ ID NO: 2824 - DNA, 25 bp, Homo sapiens
ggaaatcaatggcatcagcgggaac

SEQ ID NO: 2825 - DNA, 25 bp, Homo sapiens
gaaatcaatggcatcagcgggaact

SEQ ID NO: 2826 - DNA, 25 bp, Homo sapiens
aaatcaatggcatcagcgggaactt

SEQ ID NO: 2827 - DNA, 25 bp, Homo sapiens
aatcaatggcatcagcgggaacttc

SEQ ID NO: 2828 - DNA, 25 bp, Homo sapiens
atcaatggcatcagcgggaacttcc

SEQ ID NO: 2829 - DNA, 25 bp, Homo sapiens
tcaatggcatcagcgggaacttccc

SEQ ID NO: 2830 - DNA, 25 bp, Homo sapiens
caatggcatcagcgggaacttccca

SEQ ID NO: 2831 - DNA, 25 bp, Homo sapiens
aatggcatcagcgggaacttcccag

SEQ ID NO: 2832 - DNA, 25 bp, Homo sapiens
atggcatcagcgggaacttcccagc

SEQ ID NO: 2833 - DNA, 25 bp, Homo sapiens
tggcatcagcgggaacttcccagcc

SEQ ID NO: 2834 - DNA, 25 bp, Homo sapiens
ggcatcagcgggaacttcccagcca

SEQ ID NO: 2835 - DNA, 25 bp, Homo sapiens
gcatcagcgggaacttcccagccag

SEQ ID NO: 2836 - DNA, 25 bp, Homo sapiens
catcagcgggaacttcccagccagc

SEQ ID NO: 2837 - DNA, 25 bp, Homo sapiens
atcagcgggaacttcccagccagct

SEQ ID NO: 2838 - DNA, 25 bp, Homo sapiens
tcagcgggaacttcccagccagctc

SEQ ID NO: 2839 - DNA, 25 bp, Homo sapiens
cagcgggaacttcccagccagctcc

SEQ ID NO: 2840 - DNA, 25 bp, Homo sapiens
agcgggaacttcccagccagctccg

SEQ ID NO: 2841 - DNA, 25 bp, Homo sapiens
gcgggaacttcccagccagctccgt

SEQ ID NO: 2842 - DNA, 25 bp, Homo sapiens
cgggaacttcccagccagctccgtg

SEQ ID NO: 2843 - DNA, 25 bp, Homo sapiens
gggaacttcccagccagctccgtgg

SEQ ID NO: 2844 - DNA, 25 bp, Homo sapiens
ggaacttcccagccagctccgtgga

SEQ ID NO: 2845 - DNA, 25 bp, Homo sapiens
gaacttcccagccagctccgtggaa

SEQ ID NO: 2846 - DNA, 25 bp, Homo sapiens
aacttcccagccagctccgtggaag

SEQ ID NO: 2847 - DNA, 25 bp, Homo sapiens
acttcccagccagctccgtggaagt

SEQ ID NO: 2848 - DNA, 25 bp, Homo sapiens
cttcccagccagctccgtggaagtc

SEQ ID NO: 2849 - DNA, 25 bp, Homo sapiens
ttcccagccagctccgtggaagtca

SEQ ID NO: 2850 - DNA, 25 bp, Homo sapiens
tcccagccagctccgtggaagtcat

SEQ ID NO: 2851 - DNA, 25 bp, Homo sapiens
cccagccagctccgtggaagtcatc

SEQ ID NO: 2852 - DNA, 25 bp, Homo sapiens
ccagccagctccgtggaagtcatca

SEQ ID NO: 2853 - DNA, 25 bp, Homo sapiens
cagccagctccgtggaagtcatcaa

SEQ ID NO: 2854 - DNA, 25 bp, Homo sapiens
agccagctccgtggaagtcatcaag

SEQ ID NO: 2855 - DNA, 25 bp, Homo sapiens
gccagctccgtggaagtcatcaagc

SEQ ID NO: 2856 - DNA, 25 bp, Homo sapiens
ccagctccgtggaagtcatcaagca

SEQ ID NO: 2857 - DNA, 25 bp, Homo sapiens
cagctccgtggaagtcatcaagcag

SEQ ID NO: 2858 - DNA, 25 bp, Homo sapiens
agctccgtggaagtcatcaagcagc

SEQ ID NO: 2859 - DNA, 25 bp, Homo sapiens
gctccgtggaagtcatcaagcagct

SEQ ID NO: 2860 - DNA, 25 bp, Homo sapiens
ctccgtggaagtcatcaagcagctg

SEQ ID NO: 2861 - DNA, 25 bp, Homo sapiens
tccgtggaagtcatcaagcagctgc

SEQ ID NO: 2862 - DNA, 25 bp, Homo sapiens
ccgtggaagtcatcaagcagctgcc

SEQ ID NO: 2863 - DNA, 25 bp, Homo sapiens
cgtggaagtcatcaagcagctgccc

SEQ ID NO: 2864 - DNA, 25 bp, Homo sapiens
gtggaagtcatcaagcagctgcccc

SEQ ID NO: 2865 - DNA, 25 bp, Homo sapiens
tggaagtcatcaagcagctgcccca

SEQ ID NO: 2866 - DNA, 25 bp, Homo sapiens
ggaagtcatcaagcagctgccccag

SEQ ID NO: 2867 - DNA, 25 bp, Homo sapiens
gaagtcatcaagcagctgccccagc

SEQ ID NO: 2868 - DNA, 25 bp, Homo sapiens
aagtcatcaagcagctgccccagcc

SEQ ID NO: 2869 - DNA, 25 bp, Homo sapiens
agtcatcaagcagctgccccagccg

SEQ ID NO: 2870 - DNA, 25 bp, Homo sapiens
gtcatcaagcagctgccccagccgc

SEQ ID NO: 2871 - DNA, 25 bp, Homo sapiens
tcatcaagcagctgccccagccgcc

SEQ ID NO: 2872 - DNA, 25 bp, Homo sapiens
catcaagcagctgccccagccgccc

SEQ ID NO: 2873 - DNA, 25 bp, Homo sapiens
atcaagcagctgccccagccgcccc

SEQ ID NO: 2874 - DNA, 25 bp, Homo sapiens
tcaagcagctgccccagccgccccc

SEQ ID NO: 2875 - DNA, 25 bp, Homo sapiens
caagcagctgccccagccgcccccg

SEQ ID NO: 2876 - DNA, 25 bp, Homo sapiens
aagcagctgccccagccgcccccgc

SEQ ID NO: 2877 - DNA, 25 bp, Homo sapiens
agcagctgccccagccgcccccgct

SEQ ID NO: 2878 - DNA, 25 bp, Homo sapiens
gcagctgccccagccgcccccgctc

SEQ ID NO: 2879 - DNA, 25 bp, Homo sapiens
cagctgccccagccgcccccgctct

SEQ ID NO: 2880 - DNA, 25 bp, Homo sapiens
agctgccccagccgcccccgctctg

SEQ ID NO: 2881 - DNA, 25 bp, Homo sapiens
gctgccccagccgcccccgctctgc

SEQ ID NO: 2882 - DNA, 25 bp, Homo sapiens
ctgccccagccgcccccgctctgca

SEQ ID NO: 2883 - DNA, 25 bp, Homo sapiens
tgccccagccgcccccgctctgcag

SEQ ID NO: 2884 - DNA, 25 bp, Homo sapiens
gccccagccgcccccgctctgcagg

SEQ ID NO: 2885 - DNA, 25 bp, Homo sapiens
ccccagccgcccccgctctgcaggg

SEQ ID NO: 2886 - DNA, 25 bp, Homo sapiens
cccagccgcccccgctctgcagggc

SEQ ID NO: 2887 - DNA, 25 bp, Homo sapiens
ccagccgcccccgctctgcagggcc

SEQ ID NO: 2888 - DNA, 25 bp, Homo sapiens
cagccgcccccgctctgcagggccc

SEQ ID NO: 2889 - DNA, 25 bp, Homo sapiens
agccgcccccgctctgcagggccct

SEQ ID NO: 2890 - DNA, 25 bp, Homo sapiens
gccgcccccgctctgcagggccctc

SEQ ID NO: 2891 - DNA, 25 bp, Homo sapiens
ccgcccccgctctgcagggccctct

SEQ ID NO: 2892 - DNA, 25 bp, Homo sapiens
cgcccccgctctgcagggccctcta

SEQ ID NO: 2893 - DNA, 25 bp, Homo sapiens
gcccccgctctgcagggccctctac

SEQ ID NO: 2894 - DNA, 25 bp, Homo sapiens
cccccgctctgcagggccctctaca

SEQ ID NO: 2895 - DNA, 25 bp, Homo sapiens
ccccgctctgcagggccctctacaa

SEQ ID NO: 2896 - DNA, 25 bp, Homo sapiens
cccgctctgcagggccctctacaac

SEQ ID NO: 2897 - DNA, 25 bp, Homo sapiens
ccgctctgcagggccctctacaact

SEQ ID NO: 2898 - DNA, 25 bp, Homo sapiens
cgctctgcagggccctctacaactt

SEQ ID NO: 2899 - DNA, 25 bp, Homo sapiens
gctctgcagggccctctacaacttc

SEQ ID NO: 2900 - DNA, 25 bp, Homo sapiens
ctctgcagggccctctacaacttcg

SEQ ID NO: 2901 - DNA, 25 bp, Homo sapiens
tctgcagggccctctacaacttcga

SEQ ID NO: 2902 - DNA, 25 bp, Homo sapiens
ctgcagggccctctacaacttcgac

SEQ ID NO: 2903 - DNA, 25 bp, Homo sapiens
tgcagggccctctacaacttcgacc

SEQ ID NO: 2904 - DNA, 25 bp, Homo sapiens
gcagggccctctacaacttcgacct

SEQ ID NO: 2905 - DNA, 25 bp, Homo sapiens
cagggccctctacaacttcgaccta

SEQ ID NO: 2906 - DNA, 25 bp, Homo sapiens
agggccctctacaacttcgacctac

SEQ ID NO: 2907 - DNA, 25 bp, Homo sapiens
gggccctctacaacttcgacctacg

SEQ ID NO: 2908 - DNA, 25 bp, Homo sapiens
ggccctctacaacttcgacctacga

SEQ ID NO: 2909 - DNA, 25 bp, Homo sapiens
gccctctacaacttcgacctacgag

SEQ ID NO: 2910 - DNA, 25 bp, Homo sapiens
ccctctacaacttcgacctacgagg

SEQ ID NO: 2911 - DNA, 25 bp, Homo sapiens
cctctacaacttcgacctacgaggc

SEQ ID NO: 2912 - DNA, 25 bp, Homo sapiens
ctctacaacttcgacctacgaggca

SEQ ID NO: 2913 - DNA, 25 bp, Homo sapiens
tctacaacttcgacctacgaggcaa

SEQ ID NO: 2914 - DNA, 25 bp, Homo sapiens
ctacaacttcgacctacgaggcaag

SEQ ID NO: 2915 - DNA, 25 bp, Homo sapiens
tacaacttcgacctacgaggcaagg

SEQ ID NO: 2916 - DNA, 25 bp, Homo sapiens
acaacttcgacctacgaggcaagga

SEQ ID NO: 2917 - DNA, 25 bp, Homo sapiens
caacttcgacctacgaggcaaggac

SEQ ID NO: 2918 - DNA, 25 bp, Homo sapiens
aacttcgacctacgaggcaaggaca

SEQ ID NO: 2919 - DNA, 25 bp, Homo sapiens
acttcgacctacgaggcaaggacaa

SEQ ID NO: 2920 - DNA, 25 bp, Homo sapiens
cttcgacctacgaggcaaggacaag

SEQ ID NO: 2921 - DNA, 25 bp, Homo sapiens
ttcgacctacgaggcaaggacaaga

SEQ ID NO: 2922 - DNA, 25 bp, Homo sapiens
tcgacctacgaggcaaggacaagag

SEQ ID NO: 2923 - DNA, 25 bp, Homo sapiens
cgacctacgaggcaaggacaagagt

SEQ ID NO: 2924 - DNA, 25 bp, Homo sapiens
gacctacgaggcaaggacaagagtg

SEQ ID NO: 2925 - DNA, 25 bp, Homo sapiens
acctacgaggcaaggacaagagtga

SEQ ID NO: 2926 - DNA, 25 bp, Homo sapiens
cctacgaggcaaggacaagagtgag

SEQ ID NO: 2927 - DNA, 25 bp, Homo sapiens
ctacgaggcaaggacaagagtgaga

SEQ ID NO: 2928 - DNA, 25 bp, Homo sapiens
tacgaggcaaggacaagagtgagaa

SEQ ID NO: 2929 - DNA, 25 bp, Homo sapiens
acgaggcaaggacaagagtgagaac

SEQ ID NO: 2930 - DNA, 25 bp, Homo sapiens
cgaggcaaggacaagagtgagaacc

SEQ ID NO: 2931 - DNA, 25 bp, Homo sapiens
gaggcaaggacaagagtgagaacca

SEQ ID NO: 2932 - DNA, 25 bp, Homo sapiens
aggcaaggacaagagtgagaaccag

SEQ ID NO: 2933 - DNA, 25 bp, Homo sapiens
ggcaaggacaagagtgagaaccagg

SEQ ID NO: 2934 - DNA, 25 bp, Homo sapiens
gcaaggacaagagtgagaaccagga

SEQ ID NO: 2935 - DNA, 25 bp, Homo sapiens
caaggacaagagtgagaaccaggat

SEQ ID NO: 2936 - DNA, 25 bp, Homo sapiens
aaggacaagagtgagaaccaggatt

SEQ ID NO: 2937 - DNA, 25 bp, Homo sapiens
aggacaagagtgagaaccaggattg

SEQ ID NO: 2938 - DNA, 25 bp, Homo sapiens
ggacaagagtgagaaccaggattgc

SEQ ID NO: 2939 - DNA, 25 bp, Homo sapiens
gacaagagtgagaaccaggattgcc

SEQ ID NO: 2940 - DNA, 25 bp, Homo sapiens
acaagagtgagaaccaggattgcct

SEQ ID NO: 2941 - DNA, 25 bp, Homo sapiens
caagagtgagaaccaggattgcctg

SEQ ID NO: 2942 - DNA, 25 bp, Homo sapiens
aagagtgagaaccaggattgcctga

SEQ ID NO: 2943 - DNA, 25 bp, Homo sapiens
agagtgagaaccaggattgcctgac

SEQ ID NO: 2944 - DNA, 25 bp, Homo sapiens
gagtgagaaccaggattgcctgacc

SEQ ID NO: 2945 - DNA, 25 bp, Homo sapiens
agtgagaaccaggattgcctgacct

SEQ ID NO: 2946 - DNA, 25 bp, Homo sapiens
gtgagaaccaggattgcctgacctt

SEQ ID NO: 2947 - DNA, 25 bp, Homo sapiens
tgagaaccaggattgcctgaccttc

SEQ ID NO: 2948 - DNA, 25 bp, Homo sapiens
gagaaccaggattgcctgaccttcc

SEQ ID NO: 2949 - DNA, 25 bp, Homo sapiens
agaaccaggattgcctgaccttcct

SEQ ID NO: 2950 - DNA, 25 bp, Homo sapiens
gaaccaggattgcctgaccttcctc

SEQ ID NO: 2951 - DNA, 25 bp, Homo sapiens
aaccaggattgcctgaccttcctca

SEQ ID NO: 2952 - DNA, 25 bp, Homo sapiens
accaggattgcctgaccttcctcaa

SEQ ID NO: 2953 - DNA, 25 bp, Homo sapiens
ccaggattgcctgaccttcctcaag

SEQ ID NO: 2954 - DNA, 25 bp, Homo sapiens
caggattgcctgaccttcctcaagg

SEQ ID NO: 2955 - DNA, 25 bp, Homo sapiens
aggattgcctgaccttcctcaagga

SEQ ID NO: 2956 - DNA, 25 bp, Homo sapiens
ggattgcctgaccttcctcaaggac

SEQ ID NO: 2957 - DNA, 25 bp, Homo sapiens
gattgcctgaccttcctcaaggacg

SEQ ID NO: 2958 - DNA, 25 bp, Homo sapiens
attgcctgaccttcctcaaggacga

SEQ ID NO: 2959 - DNA, 25 bp, Homo sapiens
ttgcctgaccttcctcaaggacgat

SEQ ID NO: 2960 - DNA, 25 bp, Homo sapiens
tgcctgaccttcctcaaggacgata

SEQ ID NO: 2961 - DNA, 25 bp, Homo sapiens
gcctgaccttcctcaaggacgatat

SEQ ID NO: 2962 - DNA, 25 bp, Homo sapiens
cctgaccttcctcaaggacgatatc

SEQ ID NO: 2963 - DNA, 25 bp, Homo sapiens
ctgaccttcctcaaggacgatatca

SEQ ID NO: 2964 - DNA, 25 bp, Homo sapiens
tgaccttcctcaaggacgatatcat

SEQ ID NO: 2965 - DNA, 25 bp, Homo sapiens
gaccttcctcaaggacgatatcatc

SEQ ID NO: 2966 - DNA, 25 bp, Homo sapiens
accttcctcaaggacgatatcatca

SEQ ID NO: 2967 - DNA, 25 bp, Homo sapiens
ccttcctcaaggacgatatcatcac

SEQ ID NO: 2968 - DNA, 25 bp, Homo sapiens
cttcctcaaggacgatatcatcact

SEQ ID NO: 2969 - DNA, 25 bp, Homo sapiens
ttcctcaaggacgatatcatcactg

SEQ ID NO: 2970 - DNA, 25 bp, Homo sapiens
tcctcaaggacgatatcatcactgt

SEQ ID NO: 2971 - DNA, 25 bp, Homo sapiens
cctcaaggacgatatcatcactgtg

SEQ ID NO: 2972 - DNA, 25 bp, Homo sapiens
ctcaaggacgatatcatcactgtga

SEQ ID NO: 2973 - DNA, 25 bp, Homo sapiens
tcaaggacgatatcatcactgtgat

SEQ ID NO: 2974 - DNA, 25 bp, Homo sapiens
caaggacgatatcatcactgtgatc

SEQ ID NO: 2975 - DNA, 25 bp, Homo sapiens
aaggacgatatcatcactgtgatca

SEQ ID NO: 2976 - DNA, 25 bp, Homo sapiens
aggacgatatcatcactgtgatcag

SEQ ID NO: 2977 - DNA, 25 bp, Homo sapiens
ggacgatatcatcactgtgatcagc

SEQ ID NO: 2978 - DNA, 25 bp, Homo sapiens
gacgatatcatcactgtgatcagcc

SEQ ID NO: 2979 - DNA, 25 bp, Homo sapiens
acgatatcatcactgtgatcagccg

SEQ ID NO: 2980 - DNA, 25 bp, Homo sapiens
cgatatcatcactgtgatcagccga

SEQ ID NO: 2981 - DNA, 25 bp, Homo sapiens
gatatcatcactgtgatcagccgag

SEQ ID NO: 2982 - DNA, 25 bp, Homo sapiens
atatcatcactgtgatcagccgagt

SEQ ID NO: 2983 - DNA, 25 bp, Homo sapiens
tatcatcactgtgatcagccgagtg

SEQ ID NO: 2984 - DNA, 25 bp, Homo sapiens
atcatcactgtgatcagccgagtgg

SEQ ID NO: 2985 - DNA, 25 bp, Homo sapiens
tcatcactgtgatcagccgagtgga

SEQ ID NO: 2986 - DNA, 25 bp, Homo sapiens
catcactgtgatcagccgagtggat

SEQ ID NO: 2987 - DNA, 25 bp, Homo sapiens
atcactgtgatcagccgagtggatg

SEQ ID NO: 2988 - DNA, 25 bp, Homo sapiens
tcactgtgatcagccgagtggatga

SEQ ID NO: 2989 - DNA, 25 bp, Homo sapiens
cactgtgatcagccgagtggatgag

SEQ ID NO: 2990 - DNA, 25 bp, Homo sapiens
actgtgatcagccgagtggatgaga

SEQ ID NO: 2991 - DNA, 25 bp, Homo sapiens
ctgtgatcagccgagtggatgagaa

SEQ ID NO: 2992 - DNA, 25 bp, Homo sapiens
tgtgatcagccgagtggatgagaac

SEQ ID NO: 2993 - DNA, 25 bp, Homo sapiens
gtgatcagccgagtggatgagaact

SEQ ID NO: 2994 - DNA, 25 bp, Homo sapiens
tgatcagccgagtggatgagaactg

SEQ ID NO: 2995 - DNA, 25 bp, Homo sapiens
gatcagccgagtggatgagaactgg

SEQ ID NO: 2996 - DNA, 25 bp, Homo sapiens
atcagccgagtggatgagaactggg

SEQ ID NO: 2997 - DNA, 25 bp, Homo sapiens
tcagccgagtggatgagaactgggc

SEQ ID NO: 2998 - DNA, 25 bp, Homo sapiens
cagccgagtggatgagaactgggca

SEQ ID NO: 2999 - DNA, 25 bp, Homo sapiens
agccgagtggatgagaactgggcag

SEQ ID NO: 3000 - DNA, 25 bp, Homo sapiens
gccgagtggatgagaactgggcaga

SEQ ID NO: 3001 - DNA, 25 bp, Homo sapiens
ccgagtggatgagaactgggcagaa

SEQ ID NO: 3002 - DNA, 25 bp, Homo sapiens
cgagtggatgagaactgggcagaag

SEQ ID NO: 3003 - DNA, 25 bp, Homo sapiens
gagtggatgagaactgggcagaagg

SEQ ID NO: 3004 - DNA, 25 bp, Homo sapiens
agtggatgagaactgggcagaaggc

SEQ ID NO: 3005 - DNA, 25 bp, Homo sapiens
gtggatgagaactgggcagaaggca

SEQ ID NO: 3006 - DNA, 25 bp, Homo sapiens
tggatgagaactgggcagaaggcaa

SEQ ID NO: 3007 - DNA, 25 bp, Homo sapiens
ggatgagaactgggcagaaggcaag

SEQ ID NO: 3008 - DNA, 25 bp, Homo sapiens
gatgagaactgggcagaaggcaagt

SEQ ID NO: 3009 - DNA, 25 bp, Homo sapiens
atgagaactgggcagaaggcaagtt

SEQ ID NO: 3010 - DNA, 25 bp, Homo sapiens
tgagaactgggcagaaggcaagtta

SEQ ID NO: 3011 - DNA, 25 bp, Homo sapiens
gagaactgggcagaaggcaagttag

SEQ ID NO: 3012 - DNA, 25 bp, Homo sapiens
agaactgggcagaaggcaagttagg

SEQ ID NO: 3013 - DNA, 25 bp, Homo sapiens
gaactgggcagaaggcaagttagga

SEQ ID NO: 3014 - DNA, 25 bp, Homo sapiens
aactgggcagaaggcaagttaggag

SEQ ID NO: 3015 - DNA, 25 bp, Homo sapiens
actgggcagaaggcaagttaggaga

SEQ ID NO: 3016 - DNA, 25 bp, Homo sapiens
ctgggcagaaggcaagttaggagat

SEQ ID NO: 3017 - DNA, 25 bp, Homo sapiens
tgggcagaaggcaagttaggagata

SEQ ID NO: 3018 - DNA, 25 bp, Homo sapiens
gggcagaaggcaagttaggagataa

SEQ ID NO: 3019 - DNA, 25 bp, Homo sapiens
ggcagaaggcaagttaggagataaa

SEQ ID NO: 3020 - DNA, 25 bp, Homo sapiens
gcagaaggcaagttaggagataaag

SEQ ID NO: 3021 - DNA, 25 bp, Homo sapiens
cagaaggcaagttaggagataaagt

SEQ ID NO: 3022 - DNA, 25 bp, Homo sapiens
agaaggcaagttaggagataaagta

SEQ ID NO: 3023 - DNA, 25 bp, Homo sapiens
gaaggcaagttaggagataaagtag

SEQ ID NO: 3024 - DNA, 25 bp, Homo sapiens
aaggcaagttaggagataaagtagg

SEQ ID NO: 3025 - DNA, 25 bp, Homo sapiens
aggcaagttaggagataaagtaggc

SEQ ID NO: 3026 - DNA, 25 bp, Homo sapiens
ggcaagttaggagataaagtaggca

SEQ ID NO: 3027 - DNA, 25 bp, Homo sapiens
gcaagttaggagataaagtaggcat

SEQ ID NO: 3028 - DNA, 25 bp, Homo sapiens
caagttaggagataaagtaggcatc

SEQ ID NO: 3029 - DNA, 25 bp, Homo sapiens
aagttaggagataaagtaggcatct

SEQ ID NO: 3030 - DNA, 25 bp, Homo sapiens
agttaggagataaagtaggcatctt

SEQ ID NO: 3031 - DNA, 25 bp, Homo sapiens
gttaggagataaagtaggcatcttc

SEQ ID NO: 3032 - DNA, 25 bp, Homo sapiens
ttaggagataaagtaggcatcttcc

SEQ ID NO: 3033 - DNA, 25 bp, Homo sapiens
taggagataaagtaggcatcttccc

SEQ ID NO: 3034 - DNA, 25 bp, Homo sapiens
aggagataaagtaggcatcttccct

SEQ ID NO: 3035 - DNA, 25 bp, Homo sapiens
ggagataaagtaggcatcttcccta

SEQ ID NO: 3036 - DNA, 25 bp, Homo sapiens
gagataaagtaggcatcttccctat

SEQ ID NO: 3037 - DNA, 25 bp, Homo sapiens
agataaagtaggcatcttccctatc

SEQ ID NO: 3038 - DNA, 25 bp, Homo sapiens
gataaagtaggcatcttccctatct

SEQ ID NO: 3039 - DNA, 25 bp, Homo sapiens
ataaagtaggcatcttccctatctt

SEQ ID NO: 3040 - DNA, 25 bp, Homo sapiens
taaagtaggcatcttccctatcttg

SEQ ID NO: 3041 - DNA, 25 bp, Homo sapiens
aaagtaggcatcttccctatcttgt

SEQ ID NO: 3042 - DNA, 25 bp, Homo sapiens
aagtaggcatcttccctatcttgtt

SEQ ID NO: 3043 - DNA, 25 bp, Homo sapiens
agtaggcatcttccctatcttgttt

SEQ ID NO: 3044 - DNA, 25 bp, Homo sapiens
gtaggcatcttccctatcttgtttg

SEQ ID NO: 3045 - DNA, 25 bp, Homo sapiens
taggcatcttccctatcttgtttgt

SEQ ID NO: 3046 - DNA, 25 bp, Homo sapiens
aggcatcttccctatcttgtttgta

SEQ ID NO: 3047 - DNA, 25 bp, Homo sapiens
ggcatcttccctatcttgtttgtag

SEQ ID NO: 3048 - DNA, 25 bp, Homo sapiens
gcatcttccctatcttgtttgtaga

SEQ ID NO: 3049 - DNA, 25 bp, Homo sapiens
catcttccctatcttgtttgtagag

SEQ ID NO: 3050 - DNA, 25 bp, Homo sapiens
atcttccctatcttgtttgtagagc

SEQ ID NO: 3051 - DNA, 25 bp, Homo sapiens
tcttccctatcttgtttgtagagcc

SEQ ID NO: 3052 - DNA, 25 bp, Homo sapiens
cttccctatcttgtttgtagagcca

SEQ ID NO: 3053 - DNA, 25 bp, Homo sapiens
ttccctatcttgtttgtagagccaa

SEQ ID NO: 3054 - DNA, 25 bp, Homo sapiens
tccctatcttgtttgtagagccaaa

SEQ ID NO: 3055 - DNA, 25 bp, Homo sapiens
ccctatcttgtttgtagagccaaac

SEQ ID NO: 3056 - DNA, 25 bp, Homo sapiens
cctatcttgtttgtagagccaaacc

SEQ ID NO: 3057 - DNA, 25 bp, Homo sapiens
ctatcttgtttgtagagccaaacct

SEQ ID NO: 3058 - DNA, 25 bp, Homo sapiens
tatcttgtttgtagagccaaacctc

SEQ ID NO: 3059 - DNA, 25 bp, Homo sapiens
atcttgtttgtagagccaaacctca

SEQ ID NO: 3060 - DNA, 25 bp, Homo sapiens
tcttgtttgtagagccaaacctcac

SEQ ID NO: 3061 - DNA, 25 bp, Homo sapiens
cttgtttgtagagccaaacctcacc

SEQ ID NO: 3062 - DNA, 25 bp, Homo sapiens
ttgtttgtagagccaaacctcaccg

SEQ ID NO: 3063 - DNA, 25 bp, Homo sapiens
tgtttgtagagccaaacctcaccgc

SEQ ID NO: 3064 - DNA, 25 bp, Homo sapiens
gtttgtagagccaaacctcaccgca

SEQ ID NO: 3065 - DNA, 25 bp, Homo sapiens
tttgtagagccaaacctcaccgcaa

SEQ ID NO: 3066 - DNA, 25 bp, Homo sapiens
ttgtagagccaaacctcaccgcaag

SEQ ID NO: 3067 - DNA, 25 bp, Homo sapiens
tgtagagccaaacctcaccgcaaga

SEQ ID NO: 3068 - DNA, 25 bp, Homo sapiens
gtagagccaaacctcaccgcaagac

SEQ ID NO: 3069 - DNA, 25 bp, Homo sapiens
tagagccaaacctcaccgcaagaca

SEQ ID NO: 3070 - DNA, 25 bp, Homo sapiens
agagccaaacctcaccgcaagacac

SEQ ID NO: 3071 - DNA, 25 bp, Homo sapiens
gagccaaacctcaccgcaagacacc

SEQ ID NO: 3072 - DNA, 25 bp, Homo sapiens
agccaaacctcaccgcaagacacct

SEQ ID NO: 3073 - DNA, 25 bp, Homo sapiens
gccaaacctcaccgcaagacacctt

SEQ ID NO: 3074 - DNA, 25 bp, Homo sapiens
ccaaacctcaccgcaagacaccttt

SEQ ID NO: 3075 - DNA, 25 bp, Homo sapiens
caaacctcaccgcaagacacctttt

SEQ ID NO: 3076 - DNA, 25 bp, Homo sapiens
aaacctcaccgcaagacacctttta

SEQ ID NO: 3077 - DNA, 25 bp, Homo sapiens
aacctcaccgcaagacaccttttag

SEQ ID NO: 3078 - DNA, 25 bp, Homo sapiens
acctcaccgcaagacaccttttaga

SEQ ID NO: 3079 - DNA, 25 bp, Homo sapiens
cctcaccgcaagacaccttttagag

SEQ ID NO: 3080 - DNA, 25 bp, Homo sapiens
ctcaccgcaagacaccttttagaga

SEQ ID NO: 3081 - DNA, 25 bp, Homo sapiens
tcaccgcaagacaccttttagagaa

SEQ ID NO: 3082 - DNA, 25 bp, Homo sapiens
caccgcaagacaccttttagagaag

SEQ ID NO: 3083 - DNA, 25 bp, Homo sapiens
accgcaagacaccttttagagaaga

SEQ ID NO: 3084 - DNA, 25 bp, Homo sapiens
ccgcaagacaccttttagagaagaa

SEQ ID NO: 3085 - DNA, 25 bp, Homo sapiens
cgcaagacaccttttagagaagaac

SEQ ID NO: 3086 - DNA, 25 bp, Homo sapiens
gcaagacaccttttagagaagaaca

SEQ ID NO: 3087 - DNA, 25 bp, Homo sapiens
caagacaccttttagagaagaacaa

SEQ ID NO: 3088 - DNA, 25 bp, Homo sapiens
aagacaccttttagagaagaacaaa

SEQ ID NO: 3089 - DNA, 25 bp, Homo sapiens
agacaccttttagagaagaacaaag

SEQ ID NO: 3090 - DNA, 25 bp, Homo sapiens
gacaccttttagagaagaacaaagg

SEQ ID NO: 3091 - DNA, 25 bp, Homo sapiens
acaccttttagagaagaacaaaggt

SEQ ID NO: 3092 - DNA, 25 bp, Homo sapiens
caccttttagagaagaacaaaggtc

SEQ ID NO: 3093 - DNA, 25 bp, Homo sapiens
accttttagagaagaacaaaggtcg

SEQ ID NO: 3094 - DNA, 25 bp, Homo sapiens
ccttttagagaagaacaaaggtcgc

SEQ ID NO: 3095 - DNA, 25 bp, Homo sapiens
cttttagagaagaacaaaggtcgcc

SEQ ID NO: 3096 - DNA, 25 bp, Homo sapiens
ttttagagaagaacaaaggtcgcca

SEQ ID NO: 3097 - DNA, 25 bp, Homo sapiens
tttagagaagaacaaaggtcgccag

SEQ ID NO: 3098 - DNA, 25 bp, Homo sapiens
ttagagaagaacaaaggtcgccagt

SEQ ID NO: 3099 - DNA, 25 bp, Homo sapiens
tagagaagaacaaaggtcgccagtc

SEQ ID NO: 3100 - DNA, 25 bp, Homo sapiens
agagaagaacaaaggtcgccagtca

SEQ ID NO: 3101 - DNA, 25 bp, Homo sapiens
gagaagaacaaaggtcgccagtcat

SEQ ID NO: 3102 - DNA, 25 bp, Homo sapiens
agaagaacaaaggtcgccagtcatc

SEQ ID NO: 3103 - DNA, 25 bp, Homo sapiens
gaagaacaaaggtcgccagtcatcc

SEQ ID NO: 3104 - DNA, 25 bp, Homo sapiens
aagaacaaaggtcgccagtcatcct

SEQ ID NO: 3105 - DNA, 25 bp, Homo sapiens
agaacaaaggtcgccagtcatcctg

SEQ ID NO: 3106 - DNA, 25 bp, Homo sapiens
gaacaaaggtcgccagtcatcctgc

SEQ ID NO: 3107 - DNA, 25 bp, Homo sapiens
aacaaaggtcgccagtcatcctgca

SEQ ID NO: 3108 - DNA, 25 bp, Homo sapiens
acaaaggtcgccagtcatcctgcac

SEQ ID NO: 3109 - DNA, 25 bp, Homo sapiens
caaaggtcgccagtcatcctgcaca

SEQ ID NO: 3110 - DNA, 25 bp, Homo sapiens
aaaggtcgccagtcatcctgcacaa

SEQ ID NO: 3111 - DNA, 25 bp, Homo sapiens
aaggtcgccagtcatcctgcacaaa

SEQ ID NO: 3112 - DNA, 25 bp, Homo sapiens
aggtcgccagtcatcctgcacaaaa

SEQ ID NO: 3113 - DNA, 25 bp, Homo sapiens
ggtcgccagtcatcctgcacaaaaa

SEQ ID NO: 3114 - DNA, 25 bp, Homo sapiens
gtcgccagtcatcctgcacaaaaaa

SEQ ID NO: 3115 - DNA, 25 bp, Homo sapiens
tcgccagtcatcctgcacaaaaaac

SEQ ID NO: 3116 - DNA, 25 bp, Homo sapiens
cgccagtcatcctgcacaaaaaacc

SEQ ID NO: 3117 - DNA, 25 bp, Homo sapiens
gccagtcatcctgcacaaaaaacct

SEQ ID NO: 3118 - DNA, 25 bp, Homo sapiens
ccagtcatcctgcacaaaaaacctg

SEQ ID NO: 3119 - DNA, 25 bp, Homo sapiens
cagtcatcctgcacaaaaaacctgt

SEQ ID NO: 3120 - DNA, 25 bp, Homo sapiens
agtcatcctgcacaaaaaacctgtc

SEQ ID NO: 3121 - DNA, 25 bp, Homo sapiens
gtcatcctgcacaaaaaacctgtcc

SEQ ID NO: 3122 - DNA, 25 bp, Homo sapiens
tcatcctgcacaaaaaacctgtccc

SEQ ID NO: 3123 - DNA, 25 bp, Homo sapiens
catcctgcacaaaaaacctgtccct

SEQ ID NO: 3124 - DNA, 25 bp, Homo sapiens
atcctgcacaaaaaacctgtccctg

SEQ ID NO: 3125 - DNA, 25 bp, Homo sapiens
tcctgcacaaaaaacctgtccctgg

SEQ ID NO: 3126 - DNA, 25 bp, Homo sapiens
cctgcacaaaaaacctgtccctggt

SEQ ID NO: 3127 - DNA, 25 bp, Homo sapiens
ctgcacaaaaaacctgtccctggtg

SEQ ID NO: 3128 - DNA, 25 bp, Homo sapiens
tgcacaaaaaacctgtccctggtgt

SEQ ID NO: 3129 - DNA, 25 bp, Homo sapiens
gcacaaaaaacctgtccctggtgtc

SEQ ID NO: 3130 - DNA, 25 bp, Homo sapiens
cacaaaaaacctgtccctggtgtcc

SEQ ID NO: 3131 - DNA, 25 bp, Homo sapiens
acaaaaaacctgtccctggtgtcct

SEQ ID NO: 3132 - DNA, 25 bp, Homo sapiens
caaaaaacctgtccctggtgtcctc

SEQ ID NO: 3133 - DNA, 25 bp, Homo sapiens
aaaaaacctgtccctggtgtcctcg

SEQ ID NO: 3134 - DNA, 25 bp, Homo sapiens
aaaaacctgtccctggtgtcctcgt

SEQ ID NO: 3135 - DNA, 25 bp, Homo sapiens
aaaacctgtccctggtgtcctcgtc

SEQ ID NO: 3136 - DNA, 25 bp, Homo sapiens
aaacctgtccctggtgtcctcgtcc

SEQ ID NO: 3137 - DNA, 25 bp, Homo sapiens
aacctgtccctggtgtcctcgtcct

SEQ ID NO: 3138 - DNA, 25 bp, Homo sapiens
acctgtccctggtgtcctcgtcctc

SEQ ID NO: 3139 - DNA, 25 bp, Homo sapiens
cctgtccctggtgtcctcgtcctcc

SEQ ID NO: 3140 - DNA, 25 bp, Homo sapiens
ctgtccctggtgtcctcgtcctcca

SEQ ID NO: 3141 - DNA, 25 bp, Homo sapiens
tgtccctggtgtcctcgtcctccag

SEQ ID NO: 3142 - DNA, 25 bp, Homo sapiens
gtccctggtgtcctcgtcctccaga

SEQ ID NO: 3143 - DNA, 25 bp, Homo sapiens
tccctggtgtcctcgtcctccagag

SEQ ID NO: 3144 - DNA, 25 bp, Homo sapiens
ccctggtgtcctcgtcctccagagg

SEQ ID NO: 3145 - DNA, 25 bp, Homo sapiens
cctggtgtcctcgtcctccagaggc

SEQ ID NO: 3146 - DNA, 25 bp, Homo sapiens
ctggtgtcctcgtcctccagaggca

SEQ ID NO: 3147 - DNA, 25 bp, Homo sapiens
tggtgtcctcgtcctccagaggcaa

SEQ ID NO: 3148 - DNA, 25 bp, Homo sapiens
ggtgtcctcgtcctccagaggcaac

SEQ ID NO: 3149 - DNA, 25 bp, Homo sapiens
gtgtcctcgtcctccagaggcaaca

SEQ ID NO: 3150 - DNA, 25 bp, Homo sapiens
tgtcctcgtcctccagaggcaacac

SEQ ID NO: 3151 - DNA, 25 bp, Homo sapiens
gtcctcgtcctccagaggcaacacg

SEQ ID NO: 3152 - DNA, 25 bp, Homo sapiens
tcctcgtcctccagaggcaacacgt

SEQ ID NO: 3153 - DNA, 25 bp, Homo sapiens
cctcgtcctccagaggcaacacgtc

SEQ ID NO: 3154 - DNA, 25 bp, Homo sapiens
ctcgtcctccagaggcaacacgtct

SEQ ID NO: 3155 - DNA, 25 bp, Homo sapiens
tcgtcctccagaggcaacacgtcta

SEQ ID NO: 3156 - DNA, 25 bp, Homo sapiens
cgtcctccagaggcaacacgtctac

SEQ ID NO: 3157 - DNA, 25 bp, Homo sapiens
gtcctccagaggcaacacgtctacc

SEQ ID NO: 3158 - DNA, 25 bp, Homo sapiens
tcctccagaggcaacacgtctaccc

SEQ ID NO: 3159 - DNA, 25 bp, Homo sapiens
cctccagaggcaacacgtctaccct

SEQ ID NO: 3160 - DNA, 25 bp, Homo sapiens
ctccagaggcaacacgtctaccctc

SEQ ID NO: 3161 - DNA, 25 bp, Homo sapiens
tccagaggcaacacgtctaccctcc

SEQ ID NO: 3162 - DNA, 25 bp, Homo sapiens
ccagaggcaacacgtctaccctccg

SEQ ID NO: 3163 - DNA, 25 bp, Homo sapiens
cagaggcaacacgtctaccctccgt

SEQ ID NO: 3164 - DNA, 25 bp, Homo sapiens
agaggcaacacgtctaccctccgta

SEQ ID NO: 3165 - DNA, 25 bp, Homo sapiens
gaggcaacacgtctaccctccgtag

SEQ ID NO: 3166 - DNA, 25 bp, Homo sapiens
aggcaacacgtctaccctccgtagg

SEQ ID NO: 3167 - DNA, 25 bp, Homo sapiens
ggcaacacgtctaccctccgtaggg

SEQ ID NO: 3168 - DNA, 25 bp, Homo sapiens
gcaacacgtctaccctccgtagggg

SEQ ID NO: 3169 - DNA, 25 bp, Homo sapiens
caacacgtctaccctccgtaggggc

SEQ ID NO: 3170 - DNA, 25 bp, Homo sapiens
aacacgtctaccctccgtaggggcc

SEQ ID NO: 3171 - DNA, 25 bp, Homo sapiens
acacgtctaccctccgtaggggccc

SEQ ID NO: 3172 - DNA, 25 bp, Homo sapiens
cacgtctaccctccgtaggggccca

SEQ ID NO: 3173 - DNA, 25 bp, Homo sapiens
acgtctaccctccgtaggggcccag

SEQ ID NO: 3174 - DNA, 25 bp, Homo sapiens
cgtctaccctccgtaggggcccagg

SEQ ID NO: 3175 - DNA, 25 bp, Homo sapiens
gtctaccctccgtaggggcccaggg

SEQ ID NO: 3176 - DNA, 25 bp, Homo sapiens
tctaccctccgtaggggcccagggt

SEQ ID NO: 3177 - DNA, 25 bp, Homo sapiens
ctaccctccgtaggggcccagggtc

SEQ ID NO: 3178 - DNA, 25 bp, Homo sapiens
taccctccgtaggggcccagggtcc

SEQ ID NO: 3179 - DNA, 25 bp, Homo sapiens
accctccgtaggggcccagggtcca

SEQ ID NO: 3180 - DNA, 25 bp, Homo sapiens
ccctccgtaggggcccagggtccag

SEQ ID NO: 3181 - DNA, 25 bp, Homo sapiens
cctccgtaggggcccagggtccagg

SEQ ID NO: 3182 - DNA, 25 bp, Homo sapiens
ctccgtaggggcccagggtccagga

SEQ ID NO: 3183 - DNA, 25 bp, Homo sapiens
tccgtaggggcccagggtccaggag

SEQ ID NO: 3184 - DNA, 25 bp, Homo sapiens
ccgtaggggcccagggtccaggagg

SEQ ID NO: 3185 - DNA, 25 bp, Homo sapiens
cgtaggggcccagggtccaggagga

SEQ ID NO: 3186 - DNA, 25 bp, Homo sapiens
gtaggggcccagggtccaggaggaa

SEQ ID NO: 3187 - DNA, 25 bp, Homo sapiens
taggggcccagggtccaggaggaag

SEQ ID NO: 3188 - DNA, 25 bp, Homo sapiens
aggggcccagggtccaggaggaagg

SEQ ID NO: 3189 - DNA, 25 bp, Homo sapiens
ggggcccagggtccaggaggaaggt

SEQ ID NO: 3190 - DNA, 25 bp, Homo sapiens
gggcccagggtccaggaggaaggtg

SEQ ID NO: 3191 - DNA, 25 bp, Homo sapiens
ggcccagggtccaggaggaaggtgc

SEQ ID NO: 3192 - DNA, 25 bp, Homo sapiens
gcccagggtccaggaggaaggtgcc

SEQ ID NO: 3193 - DNA, 25 bp, Homo sapiens
cccagggtccaggaggaaggtgcct

SEQ ID NO: 3194 - DNA, 25 bp, Homo sapiens
ccagggtccaggaggaaggtgcctg

SEQ ID NO: 3195 - DNA, 25 bp, Homo sapiens
cagggtccaggaggaaggtgcctgg

SEQ ID NO: 3196 - DNA, 25 bp, Homo sapiens
agggtccaggaggaaggtgcctggg

SEQ ID NO: 3197 - DNA, 25 bp, Homo sapiens
gggtccaggaggaaggtgcctgggc

SEQ ID NO: 3198 - DNA, 25 bp, Homo sapiens
ggtccaggaggaaggtgcctgggca

SEQ ID NO: 3199 - DNA, 25 bp, Homo sapiens
gtccaggaggaaggtgcctgggcag

SEQ ID NO: 3200 - DNA, 25 bp, Homo sapiens
tccaggaggaaggtgcctgggcagt

SEQ ID NO: 3201 - DNA, 25 bp, Homo sapiens
ccaggaggaaggtgcctgggcagtt

SEQ ID NO: 3202 - DNA, 25 bp, Homo sapiens
caggaggaaggtgcctgggcagttt

SEQ ID NO: 3203 - DNA, 25 bp, Homo sapiens
aggaggaaggtgcctgggcagtttt

SEQ ID NO: 3204 - DNA, 25 bp, Homo sapiens
ggaggaaggtgcctgggcagttttc

SEQ ID NO: 3205 - DNA, 25 bp, Homo sapiens
gaggaaggtgcctgggcagttttcc

SEQ ID NO: 3206 - DNA, 25 bp, Homo sapiens
aggaaggtgcctgggcagttttcca

SEQ ID NO: 3207 - DNA, 25 bp, Homo sapiens
ggaaggtgcctgggcagttttccat

SEQ ID NO: 3208 - DNA, 25 bp, Homo sapiens
gaaggtgcctgggcagttttccatc

SEQ ID NO: 3209 - DNA, 25 bp, Homo sapiens
aaggtgcctgggcagttttccatca

SEQ ID NO: 3210 - DNA, 25 bp, Homo sapiens
aggtgcctgggcagttttccatcac

SEQ ID NO: 3211 - DNA, 25 bp, Homo sapiens
ggtgcctgggcagttttccatcaca

SEQ ID NO: 3212 - DNA, 25 bp, Homo sapiens
gtgcctgggcagttttccatcacaa

SEQ ID NO: 3213 - DNA, 25 bp, Homo sapiens
tgcctgggcagttttccatcacaac

SEQ ID NO: 3214 - DNA, 25 bp, Homo sapiens
gcctgggcagttttccatcacaaca

SEQ ID NO: 3215 - DNA, 25 bp, Homo sapiens
cctgggcagttttccatcacaacag

SEQ ID NO: 3216 - DNA, 25 bp, Homo sapiens
ctgggcagttttccatcacaacagc

SEQ ID NO: 3217 - DNA, 25 bp, Homo sapiens
tgggcagttttccatcacaacagcc

SEQ ID NO: 3218 - DNA, 25 bp, Homo sapiens
gggcagttttccatcacaacagcct

SEQ ID NO: 3219 - DNA, 25 bp, Homo sapiens
ggcagttttccatcacaacagcctt

SEQ ID NO: 3220 - DNA, 25 bp, Homo sapiens
gcagttttccatcacaacagccttg

SEQ ID NO: 3221 - DNA, 25 bp, Homo sapiens
cagttttccatcacaacagccttga

SEQ ID NO: 3222 - DNA, 25 bp, Homo sapiens
agttttccatcacaacagccttgaa

SEQ ID NO: 3223 - DNA, 25 bp, Homo sapiens
gttttccatcacaacagccttgaac

SEQ ID NO: 3224 - DNA, 25 bp, Homo sapiens
ttttccatcacaacagccttgaaca

SEQ ID NO: 3225 - DNA, 25 bp, Homo sapiens
tttccatcacaacagccttgaacac

SEQ ID NO: 3226 - DNA, 25 bp, Homo sapiens
ttccatcacaacagccttgaacact

SEQ ID NO: 3227 - DNA, 25 bp, Homo sapiens
tccatcacaacagccttgaacactc

SEQ ID NO: 3228 - DNA, 25 bp, Homo sapiens
ccatcacaacagccttgaacactct

SEQ ID NO: 3229 - DNA, 25 bp, Homo sapiens
catcacaacagccttgaacactctc

SEQ ID NO: 3230 - DNA, 25 bp, Homo sapiens
atcacaacagccttgaacactctca

SEQ ID NO: 3231 - DNA, 25 bp, Homo sapiens
tcacaacagccttgaacactctcaa

SEQ ID NO: 3232 - DNA, 25 bp, Homo sapiens
cacaacagccttgaacactctcaac

SEQ ID NO: 3233 - DNA, 25 bp, Homo sapiens
acaacagccttgaacactctcaacc

SEQ ID NO: 3234 - DNA, 25 bp, Homo sapiens
caacagccttgaacactctcaaccg

SEQ ID NO: 3235 - DNA, 25 bp, Homo sapiens
aacagccttgaacactctcaaccgg

SEQ ID NO: 3236 - DNA, 25 bp, Homo sapiens
acagccttgaacactctcaaccgga

SEQ ID NO: 3237 - DNA, 25 bp, Homo sapiens
cagccttgaacactctcaaccggat

SEQ ID NO: 3238 - DNA, 25 bp, Homo sapiens
agccttgaacactctcaaccggatg

SEQ ID NO: 3239 - DNA, 25 bp, Homo sapiens
gccttgaacactctcaaccggatgg

SEQ ID NO: 3240 - DNA, 25 bp, Homo sapiens
ccttgaacactctcaaccggatggt

SEQ ID NO: 3241 - DNA, 25 bp, Homo sapiens
cttgaacactctcaaccggatggtc

SEQ ID NO: 3242 - DNA, 25 bp, Homo sapiens
ttgaacactctcaaccggatggtcc

SEQ ID NO: 3243 - DNA, 25 bp, Homo sapiens
tgaacactctcaaccggatggtcca

SEQ ID NO: 3244 - DNA, 25 bp, Homo sapiens
gaacactctcaaccggatggtccat

SEQ ID NO: 3245 - DNA, 25 bp, Homo sapiens
aacactctcaaccggatggtccatt

SEQ ID NO: 3246 - DNA, 25 bp, Homo sapiens
acactctcaaccggatggtccattc

SEQ ID NO: 3247 - DNA, 25 bp, Homo sapiens
cactctcaaccggatggtccattct

SEQ ID NO: 3248 - DNA, 25 bp, Homo sapiens
actctcaaccggatggtccattctc

SEQ ID NO: 3249 - DNA, 25 bp, Homo sapiens
ctctcaaccggatggtccattctcc

SEQ ID NO: 3250 - DNA, 25 bp, Homo sapiens
tctcaaccggatggtccattctcct

SEQ ID NO: 3251 - DNA, 25 bp, Homo sapiens
ctcaaccggatggtccattctcctt

SEQ ID NO: 3252 - DNA, 25 bp, Homo sapiens
tcaaccggatggtccattctccttc

SEQ ID NO: 3253 - DNA, 25 bp, Homo sapiens
caaccggatggtccattctccttca

SEQ ID NO: 3254 - DNA, 25 bp, Homo sapiens
aaccggatggtccattctccttcag

SEQ ID NO: 3255 - DNA, 25 bp, Homo sapiens
accggatggtccattctccttcagg

SEQ ID NO: 3256 - DNA, 25 bp, Homo sapiens
ccggatggtccattctccttcaggg

SEQ ID NO: 3257 - DNA, 25 bp, Homo sapiens
cggatggtccattctccttcagggc

SEQ ID NO: 3258 - DNA, 25 bp, Homo sapiens
ggatggtccattctccttcagggcg

SEQ ID NO: 3259 - DNA, 25 bp, Homo sapiens
gatggtccattctccttcagggcgc

SEQ ID NO: 3260 - DNA, 25 bp, Homo sapiens
atggtccattctccttcagggcgcc

SEQ ID NO: 3261 - DNA, 25 bp, Homo sapiens
tggtccattctccttcagggcgcca

SEQ ID NO: 3262 - DNA, 25 bp, Homo sapiens
ggtccattctccttcagggcgccat

SEQ ID NO: 3263 - DNA, 25 bp, Homo sapiens
gtccattctccttcagggcgccata

SEQ ID NO: 3264 - DNA, 25 bp, Homo sapiens
tccattctccttcagggcgccatat

SEQ ID NO: 3265 - DNA, 25 bp, Homo sapiens
ccattctccttcagggcgccatatg

SEQ ID NO: 3266 - DNA, 25 bp, Homo sapiens
cattctccttcagggcgccatatgg

SEQ ID NO: 3267 - DNA, 25 bp, Homo sapiens
attctccttcagggcgccatatggt

SEQ ID NO: 3268 - DNA, 25 bp, Homo sapiens
ttctccttcagggcgccatatggta

SEQ ID NO: 3269 - DNA, 25 bp, Homo sapiens
tctccttcagggcgccatatggtag

SEQ ID NO: 3270 - DNA, 25 bp, Homo sapiens
ctccttcagggcgccatatggtaga

SEQ ID NO: 3271 - DNA, 25 bp, Homo sapiens
tccttcagggcgccatatggtagag

SEQ ID NO: 3272 - DNA, 25 bp, Homo sapiens
ccttcagggcgccatatggtagaga

SEQ ID NO: 3273 - DNA, 25 bp, Homo sapiens
cttcagggcgccatatggtagagat

SEQ ID NO: 3274 - DNA, 25 bp, Homo sapiens
ttcagggcgccatatggtagagatc

SEQ ID NO: 3275 - DNA, 25 bp, Homo sapiens
tcagggcgccatatggtagagatca

SEQ ID NO: 3276 - DNA, 25 bp, Homo sapiens
cagggcgccatatggtagagatcag

SEQ ID NO: 3277 - DNA, 25 bp, Homo sapiens
agggcgccatatggtagagatcagc

SEQ ID NO: 3278 - DNA, 25 bp, Homo sapiens
gggcgccatatggtagagatcagca

SEQ ID NO: 3279 - DNA, 25 bp, Homo sapiens
ggcgccatatggtagagatcagcac

SEQ ID NO: 3280 - DNA, 25 bp, Homo sapiens
gcgccatatggtagagatcagcacc

SEQ ID NO: 3281 - DNA, 25 bp, Homo sapiens
cgccatatggtagagatcagcaccc

SEQ ID NO: 3282 - DNA, 25 bp, Homo sapiens
gccatatggtagagatcagcacccc

SEQ ID NO: 3283 - DNA, 25 bp, Homo sapiens
ccatatggtagagatcagcacccca

SEQ ID NO: 3284 - DNA, 25 bp, Homo sapiens
catatggtagagatcagcaccccag

SEQ ID NO: 3285 - DNA, 25 bp, Homo sapiens
atatggtagagatcagcaccccagt

SEQ ID NO: 3286 - DNA, 25 bp, Homo sapiens
tatggtagagatcagcaccccagtg

SEQ ID NO: 3287 - DNA, 25 bp, Homo sapiens
atggtagagatcagcaccccagtgc

SEQ ID NO: 3288 - DNA, 25 bp, Homo sapiens
tggtagagatcagcaccccagtgct

SEQ ID NO: 3289 - DNA, 25 bp, Homo sapiens
ggtagagatcagcaccccagtgctc

SEQ ID NO: 3290 - DNA, 25 bp, Homo sapiens
gtagagatcagcaccccagtgctca

SEQ ID NO: 3291 - DNA, 25 bp, Homo sapiens
tagagatcagcaccccagtgctcat

SEQ ID NO: 3292 - DNA, 25 bp, Homo sapiens
agagatcagcaccccagtgctcatc

SEQ ID NO: 3293 - DNA, 25 bp, Homo sapiens
gagatcagcaccccagtgctcatca

SEQ ID NO: 3294 - DNA, 25 bp, Homo sapiens
agatcagcaccccagtgctcatcag

SEQ ID NO: 3295 - DNA, 25 bp, Homo sapiens
gatcagcaccccagtgctcatcagc

SEQ ID NO: 3296 - DNA, 25 bp, Homo sapiens
atcagcaccccagtgctcatcagct

SEQ ID NO: 3297 - DNA, 25 bp, Homo sapiens
tcagcaccccagtgctcatcagctc

SEQ ID NO: 3298 - DNA, 25 bp, Homo sapiens
cagcaccccagtgctcatcagctcc

SEQ ID NO: 3299 - DNA, 25 bp, Homo sapiens
agcaccccagtgctcatcagctcca

SEQ ID NO: 3300 - DNA, 25 bp, Homo sapiens
gcaccccagtgctcatcagctccag

SEQ ID NO: 3301 - DNA, 25 bp, Homo sapiens
caccccagtgctcatcagctccagc

SEQ ID NO: 3302 - DNA, 25 bp, Homo sapiens
accccagtgctcatcagctccagca

SEQ ID NO: 3303 - DNA, 25 bp, Homo sapiens
ccccagtgctcatcagctccagcaa

SEQ ID NO: 3304 - DNA, 25 bp, Homo sapiens
cccagtgctcatcagctccagcaac

SEQ ID NO: 3305 - DNA, 25 bp, Homo sapiens
ccagtgctcatcagctccagcaacc

SEQ ID NO: 3306 - DNA, 25 bp, Homo sapiens
cagtgctcatcagctccagcaaccc

SEQ ID NO: 3307 - DNA, 25 bp, Homo sapiens
agtgctcatcagctccagcaacccc

SEQ ID NO: 3308 - DNA, 25 bp, Homo sapiens
gtgctcatcagctccagcaacccct

SEQ ID NO: 3309 - DNA, 25 bp, Homo sapiens
tgctcatcagctccagcaacccctc

SEQ ID NO: 3310 - DNA, 25 bp, Homo sapiens
gctcatcagctccagcaacccctct

SEQ ID NO: 3311 - DNA, 25 bp, Homo sapiens
ctcatcagctccagcaacccctctg

SEQ ID NO: 3312 - DNA, 25 bp, Homo sapiens
tcatcagctccagcaacccctctgt

SEQ ID NO: 3313 - DNA, 25 bp, Homo sapiens
catcagctccagcaacccctctgtg

SEQ ID NO: 3314 - DNA, 25 bp, Homo sapiens
atcagctccagcaacccctctgtga

SEQ ID NO: 3315 - DNA, 25 bp, Homo sapiens
tcagctccagcaacccctctgtgat

SEQ ID NO: 3316 - DNA, 25 bp, Homo sapiens
cagctccagcaacccctctgtgatc

SEQ ID NO: 3317 - DNA, 25 bp, Homo sapiens
agctccagcaacccctctgtgatca

SEQ ID NO: 3318 - DNA, 25 bp, Homo sapiens
gctccagcaacccctctgtgatcac

SEQ ID NO: 3319 - DNA, 25 bp, Homo sapiens
ctccagcaacccctctgtgatcacc

SEQ ID NO: 3320 - DNA, 25 bp, Homo sapiens
tccagcaacccctctgtgatcaccc

SEQ ID NO: 3321 - DNA, 25 bp, Homo sapiens
ccagcaacccctctgtgatcaccca

SEQ ID NO: 3322 - DNA, 25 bp, Homo sapiens
cagcaacccctctgtgatcacccag

SEQ ID NO: 3323 - DNA, 25 bp, Homo sapiens
agcaacccctctgtgatcacccagc

SEQ ID NO: 3324 - DNA, 25 bp, Homo sapiens
gcaacccctctgtgatcacccagcc

SEQ ID NO: 3325 - DNA, 25 bp, Homo sapiens
caacccctctgtgatcacccagccc

SEQ ID NO: 3326 - DNA, 25 bp, Homo sapiens
aacccctctgtgatcacccagccca

SEQ ID NO: 3327 - DNA, 25 bp, Homo sapiens
acccctctgtgatcacccagcccat

SEQ ID NO: 3328 - DNA, 25 bp, Homo sapiens
cccctctgtgatcacccagcccatg

SEQ ID NO: 3329 - DNA, 25 bp, Homo sapiens
ccctctgtgatcacccagcccatgg

SEQ ID NO: 3330 - DNA, 25 bp, Homo sapiens
cctctgtgatcacccagcccatgga

SEQ ID NO: 3331 - DNA, 25 bp, Homo sapiens
ctctgtgatcacccagcccatggag

SEQ ID NO: 3332 - DNA, 25 bp, Homo sapiens
tctgtgatcacccagcccatggaga

SEQ ID NO: 3333 - DNA, 25 bp, Homo sapiens
ctgtgatcacccagcccatggagaa

SEQ ID NO: 3334 - DNA, 25 bp, Homo sapiens
tgtgatcacccagcccatggagaaa

SEQ ID NO: 3335 - DNA, 25 bp, Homo sapiens
gtgatcacccagcccatggagaaag

SEQ ID NO: 3336 - DNA, 25 bp, Homo sapiens
tgatcacccagcccatggagaaagc

SEQ ID NO: 3337 - DNA, 25 bp, Homo sapiens
gatcacccagcccatggagaaagca

SEQ ID NO: 3338 - DNA, 25 bp, Homo sapiens
atcacccagcccatggagaaagcag

SEQ ID NO: 3339 - DNA, 25 bp, Homo sapiens
tcacccagcccatggagaaagcaga

SEQ ID NO: 3340 - DNA, 25 bp, Homo sapiens
cacccagcccatggagaaagcagac

SEQ ID NO: 3341 - DNA, 25 bp, Homo sapiens
acccagcccatggagaaagcagacg

SEQ ID NO: 3342 - DNA, 25 bp, Homo sapiens
cccagcccatggagaaagcagacgt

SEQ ID NO: 3343 - DNA, 25 bp, Homo sapiens
ccagcccatggagaaagcagacgtt

SEQ ID NO: 3344 - DNA, 25 bp, Homo sapiens
cagcccatggagaaagcagacgttc

SEQ ID NO: 3345 - DNA, 25 bp, Homo sapiens
agcccatggagaaagcagacgttcc

SEQ ID NO: 3346 - DNA, 25 bp, Homo sapiens
gcccatggagaaagcagacgttcct

SEQ ID NO: 3347 - DNA, 25 bp, Homo sapiens
cccatggagaaagcagacgttcctt

SEQ ID NO: 3348 - DNA, 25 bp, Homo sapiens
ccatggagaaagcagacgttccttc

SEQ ID NO: 3349 - DNA, 25 bp, Homo sapiens
catggagaaagcagacgttccttcc

SEQ ID NO: 3350 - DNA, 25 bp, Homo sapiens
atggagaaagcagacgttccttcca

SEQ ID NO: 3351 - DNA, 25 bp, Homo sapiens
tggagaaagcagacgttccttccag

SEQ ID NO: 3352 - DNA, 25 bp, Homo sapiens
ggagaaagcagacgttccttccagc

SEQ ID NO: 3353 - DNA, 25 bp, Homo sapiens
gagaaagcagacgttccttccagct

SEQ ID NO: 3354 - DNA, 25 bp, Homo sapiens
agaaagcagacgttccttccagctg

SEQ ID NO: 3355 - DNA, 25 bp, Homo sapiens
gaaagcagacgttccttccagctgt

SEQ ID NO: 3356 - DNA, 25 bp, Homo sapiens
aaagcagacgttccttccagctgtg

SEQ ID NO: 3357 - DNA, 25 bp, Homo sapiens
aagcagacgttccttccagctgtgt

SEQ ID NO: 3358 - DNA, 25 bp, Homo sapiens
agcagacgttccttccagctgtgtg

SEQ ID NO: 3359 - DNA, 25 bp, Homo sapiens
gcagacgttccttccagctgtgtgg

SEQ ID NO: 3360 - DNA, 25 bp, Homo sapiens
cagacgttccttccagctgtgtggg

SEQ ID NO: 3361 - DNA, 25 bp, Homo sapiens
agacgttccttccagctgtgtggga

SEQ ID NO: 3362 - DNA, 25 bp, Homo sapiens
gacgttccttccagctgtgtgggac

SEQ ID NO: 3363 - DNA, 25 bp, Homo sapiens
acgttccttccagctgtgtgggaca

SEQ ID NO: 3364 - DNA, 25 bp, Homo sapiens
cgttccttccagctgtgtgggacag

SEQ ID NO: 3365 - DNA, 25 bp, Homo sapiens
gttccttccagctgtgtgggacagg

SEQ ID NO: 3366 - DNA, 25 bp, Homo sapiens
ttccttccagctgtgtgggacaggt

SEQ ID NO: 3367 - DNA, 25 bp, Homo sapiens
tccttccagctgtgtgggacaggtc

SEQ ID NO: 3368 - DNA, 25 bp, Homo sapiens
ccttccagctgtgtgggacaggtca

SEQ ID NO: 3369 - DNA, 25 bp, Homo sapiens
cttccagctgtgtgggacaggtcag

SEQ ID NO: 3370 - DNA, 25 bp, Homo sapiens
ttccagctgtgtgggacaggtcagc

SEQ ID NO: 3371 - DNA, 25 bp, Homo sapiens
tccagctgtgtgggacaggtcagca

SEQ ID NO: 3372 - DNA, 25 bp, Homo sapiens
ccagctgtgtgggacaggtcagcac

SEQ ID NO: 3373 - DNA, 25 bp, Homo sapiens
cagctgtgtgggacaggtcagcact

SEQ ID NO: 3374 - DNA, 25 bp, Homo sapiens
agctgtgtgggacaggtcagcactt

SEQ ID NO: 3375 - DNA, 25 bp, Homo sapiens
gctgtgtgggacaggtcagcactta

SEQ ID NO: 3376 - DNA, 25 bp, Homo sapiens
ctgtgtgggacaggtcagcacttat

SEQ ID NO: 3377 - DNA, 25 bp, Homo sapiens
tgtgtgggacaggtcagcacttatc

SEQ ID NO: 3378 - DNA, 25 bp, Homo sapiens
gtgtgggacaggtcagcacttatca

SEQ ID NO: 3379 - DNA, 25 bp, Homo sapiens
tgtgggacaggtcagcacttatcac

SEQ ID NO: 3380 - DNA, 25 bp, Homo sapiens
gtgggacaggtcagcacttatcacc

SEQ ID NO: 3381 - DNA, 25 bp, Homo sapiens
tgggacaggtcagcacttatcaccc

SEQ ID NO: 3382 - DNA, 25 bp, Homo sapiens
gggacaggtcagcacttatcacccc

SEQ ID NO: 3383 - DNA, 25 bp, Homo sapiens
ggacaggtcagcacttatcaccccg

SEQ ID NO: 3384 - DNA, 25 bp, Homo sapiens
gacaggtcagcacttatcaccccgc

SEQ ID NO: 3385 - DNA, 25 bp, Homo sapiens
acaggtcagcacttatcaccccgca

SEQ ID NO: 3386 - DNA, 25 bp, Homo sapiens
caggtcagcacttatcaccccgcac

SEQ ID NO: 3387 - DNA, 25 bp, Homo sapiens
aggtcagcacttatcaccccgcacc

SEQ ID NO: 3388 - DNA, 25 bp, Homo sapiens
ggtcagcacttatcaccccgcacct

SEQ ID NO: 3389 - DNA, 25 bp, Homo sapiens
gtcagcacttatcaccccgcacctg

SEQ ID NO: 3390 - DNA, 25 bp, Homo sapiens
tcagcacttatcaccccgcacctgt

SEQ ID NO: 3391 - DNA, 25 bp, Homo sapiens
cagcacttatcaccccgcacctgtc

SEQ ID NO: 3392 - DNA, 25 bp, Homo sapiens
agcacttatcaccccgcacctgtct

SEQ ID NO: 3393 - DNA, 25 bp, Homo sapiens
gcacttatcaccccgcacctgtctc

SEQ ID NO: 3394 - DNA, 25 bp, Homo sapiens
cacttatcaccccgcacctgtctct

SEQ ID NO: 3395 - DNA, 25 bp, Homo sapiens
acttatcaccccgcacctgtctctc

SEQ ID NO: 3396 - DNA, 25 bp, Homo sapiens
cttatcaccccgcacctgtctctcc

SEQ ID NO: 3397 - DNA, 25 bp, Homo sapiens
ttatcaccccgcacctgtctctcca

SEQ ID NO: 3398 - DNA, 25 bp, Homo sapiens
tatcaccccgcacctgtctctccag

SEQ ID NO: 3399 - DNA, 25 bp, Homo sapiens
atcaccccgcacctgtctctccagg

SEQ ID NO: 3400 - DNA, 25 bp, Homo sapiens
tcaccccgcacctgtctctccagga

SEQ ID NO: 3401 - DNA, 25 bp, Homo sapiens
caccccgcacctgtctctccaggac

SEQ ID NO: 3402 - DNA, 25 bp, Homo sapiens
accccgcacctgtctctccaggaca

SEQ ID NO: 3403 - DNA, 25 bp, Homo sapiens
ccccgcacctgtctctccaggacat

SEQ ID NO: 3404 - DNA, 25 bp, Homo sapiens
cccgcacctgtctctccaggacatt

SEQ ID NO: 3405 - DNA, 25 bp, Homo sapiens
ccgcacctgtctctccaggacattc

SEQ ID NO: 3406 - DNA, 25 bp, Homo sapiens
cgcacctgtctctccaggacattcc

SEQ ID NO: 3407 - DNA, 25 bp, Homo sapiens
gcacctgtctctccaggacattcca

SEQ ID NO: 3408 - DNA, 25 bp, Homo sapiens
cacctgtctctccaggacattccac

SEQ ID NO: 3409 - DNA, 25 bp, Homo sapiens
acctgtctctccaggacattccaca

SEQ ID NO: 3410 - DNA, 25 bp, Homo sapiens
cctgtctctccaggacattccacag

SEQ ID NO: 3411 - DNA, 25 bp, Homo sapiens
ctgtctctccaggacattccacagc

SEQ ID NO: 3412 - DNA, 25 bp, Homo sapiens
tgtctctccaggacattccacagcc

SEQ ID NO: 3413 - DNA, 25 bp, Homo sapiens
gtctctccaggacattccacagccg

SEQ ID NO: 3414 - DNA, 25 bp, Homo sapiens
tctctccaggacattccacagccgt

SEQ ID NO: 3415 - DNA, 25 bp, Homo sapiens
ctctccaggacattccacagccgtg

SEQ ID NO: 3416 - DNA, 25 bp, Homo sapiens
tctccaggacattccacagccgtgg

SEQ ID NO: 3417 - DNA, 25 bp, Homo sapiens
ctccaggacattccacagccgtggt

SEQ ID NO: 3418 - DNA, 25 bp, Homo sapiens
tccaggacattccacagccgtggtc

SEQ ID NO: 3419 - DNA, 25 bp, Homo sapiens
ccaggacattccacagccgtggtca

SEQ ID NO: 3420 - DNA, 25 bp, Homo sapiens
caggacattccacagccgtggtcag

SEQ ID NO: 3421 - DNA, 25 bp, Homo sapiens
aggacattccacagccgtggtcagt

SEQ ID NO: 3422 - DNA, 25 bp, Homo sapiens
ggacattccacagccgtggtcagtc

SEQ ID NO: 3423 - DNA, 25 bp, Homo sapiens
gacattccacagccgtggtcagtct

SEQ ID NO: 3424 - DNA, 25 bp, Homo sapiens
acattccacagccgtggtcagtctg

SEQ ID NO: 3425 - DNA, 25 bp, Homo sapiens
cattccacagccgtggtcagtctgc

SEQ ID NO: 3426 - DNA, 25 bp, Homo sapiens
attccacagccgtggtcagtctgcc

SEQ ID NO: 3427 - DNA, 25 bp, Homo sapiens
ttccacagccgtggtcagtctgcct

SEQ ID NO: 3428 - DNA, 25 bp, Homo sapiens
tccacagccgtggtcagtctgcctg

SEQ ID NO: 3429 - DNA, 25 bp, Homo sapiens
ccacagccgtggtcagtctgcctgg

SEQ ID NO: 3430 - DNA, 25 bp, Homo sapiens
cacagccgtggtcagtctgcctggc

SEQ ID NO: 3431 - DNA, 25 bp, Homo sapiens
acagccgtggtcagtctgcctggct

SEQ ID NO: 3432 - DNA, 25 bp, Homo sapiens
cagccgtggtcagtctgcctggctc

SEQ ID NO: 3433 - DNA, 25 bp, Homo sapiens
agccgtggtcagtctgcctggctcc

SEQ ID NO: 3434 - DNA, 25 bp, Homo sapiens
gccgtggtcagtctgcctggctccc

SEQ ID NO: 3435 - DNA, 25 bp, Homo sapiens
ccgtggtcagtctgcctggctccca

SEQ ID NO: 3436 - DNA, 25 bp, Homo sapiens
cgtggtcagtctgcctggctcccag

SEQ ID NO: 3437 - DNA, 25 bp, Homo sapiens
gtggtcagtctgcctggctcccagc

SEQ ID NO: 3438 - DNA, 25 bp, Homo sapiens
tggtcagtctgcctggctcccagca

SEQ ID NO: 3439 - DNA, 25 bp, Homo sapiens
ggtcagtctgcctggctcccagcaa

SEQ ID NO: 3440 - DNA, 25 bp, Homo sapiens
gtcagtctgcctggctcccagcaac

SEQ ID NO: 3441 - DNA, 25 bp, Homo sapiens
tcagtctgcctggctcccagcaaca

SEQ ID NO: 3442 - DNA, 25 bp, Homo sapiens
cagtctgcctggctcccagcaacac

SEQ ID NO: 3443 - DNA, 25 bp, Homo sapiens
agtctgcctggctcccagcaacacc

SEQ ID NO: 3444 - DNA, 25 bp, Homo sapiens
gtctgcctggctcccagcaacacct

SEQ ID NO: 3445 - DNA, 25 bp, Homo sapiens
tctgcctggctcccagcaacacctc

SEQ ID NO: 3446 - DNA, 25 bp, Homo sapiens
ctgcctggctcccagcaacacctct

SEQ ID NO: 3447 - DNA, 25 bp, Homo sapiens
tgcctggctcccagcaacacctctc

SEQ ID NO: 3448 - DNA, 25 bp, Homo sapiens
gcctggctcccagcaacacctctca

SEQ ID NO: 3449 - DNA, 25 bp, Homo sapiens
cctggctcccagcaacacctctcag

SEQ ID NO: 3450 - DNA, 25 bp, Homo sapiens
ctggctcccagcaacacctctcagc

SEQ ID NO: 3451 - DNA, 25 bp, Homo sapiens
tggctcccagcaacacctctcagcg

SEQ ID NO: 3452 - DNA, 25 bp, Homo sapiens
ggctcccagcaacacctctcagcga

SEQ ID NO: 3453 - DNA, 25 bp, Homo sapiens
gctcccagcaacacctctcagcgaa

SEQ ID NO: 3454 - DNA, 25 bp, Homo sapiens
ctcccagcaacacctctcagcgaac

SEQ ID NO: 3455 - DNA, 25 bp, Homo sapiens
tcccagcaacacctctcagcgaaca

SEQ ID NO: 3456 - DNA, 25 bp, Homo sapiens
cccagcaacacctctcagcgaacat

SEQ ID NO: 3457 - DNA, 25 bp, Homo sapiens
ccagcaacacctctcagcgaacatg

SEQ ID NO: 3458 - DNA, 25 bp, Homo sapiens
cagcaacacctctcagcgaacatgt

SEQ ID NO: 3459 - DNA, 25 bp, Homo sapiens
agcaacacctctcagcgaacatgtt

SEQ ID NO: 3460 - DNA, 25 bp, Homo sapiens
gcaacacctctcagcgaacatgttt

SEQ ID NO: 3461 - DNA, 25 bp, Homo sapiens
caacacctctcagcgaacatgtttg

SEQ ID NO: 3462 - DNA, 25 bp, Homo sapiens
aacacctctcagcgaacatgtttgt

SEQ ID NO: 3463 - DNA, 25 bp, Homo sapiens
acacctctcagcgaacatgtttgta

SEQ ID NO: 3464 - DNA, 25 bp, Homo sapiens
cacctctcagcgaacatgtttgtag

SEQ ID NO: 3465 - DNA, 25 bp, Homo sapiens
acctctcagcgaacatgtttgtagc

SEQ ID NO: 3466 - DNA, 25 bp, Homo sapiens
cctctcagcgaacatgtttgtagcc

SEQ ID NO: 3467 - DNA, 25 bp, Homo sapiens
ctctcagcgaacatgtttgtagccc

SEQ ID NO: 3468 - DNA, 25 bp, Homo sapiens
tctcagcgaacatgtttgtagccct

SEQ ID NO: 3469 - DNA, 25 bp, Homo sapiens
ctcagcgaacatgtttgtagccctg

SEQ ID NO: 3470 - DNA, 25 bp, Homo sapiens
tcagcgaacatgtttgtagccctgc

SEQ ID NO: 3471 - DNA, 25 bp, Homo sapiens
cagcgaacatgtttgtagccctgca

SEQ ID NO: 3472 - DNA, 25 bp, Homo sapiens
agcgaacatgtttgtagccctgcac

SEQ ID NO: 3473 - DNA, 25 bp, Homo sapiens
gcgaacatgtttgtagccctgcact

SEQ ID NO: 3474 - DNA, 25 bp, Homo sapiens
cgaacatgtttgtagccctgcactc

SEQ ID NO: 3475 - DNA, 25 bp, Homo sapiens
gaacatgtttgtagccctgcactcc

SEQ ID NO: 3476 - DNA, 25 bp, Homo sapiens
aacatgtttgtagccctgcactcct

SEQ ID NO: 3477 - DNA, 25 bp, Homo sapiens
acatgtttgtagccctgcactccta

SEQ ID NO: 3478 - DNA, 25 bp, Homo sapiens
catgtttgtagccctgcactcctac

SEQ ID NO: 3479 - DNA, 25 bp, Homo sapiens
atgtttgtagccctgcactcctact

SEQ ID NO: 3480 - DNA, 25 bp, Homo sapiens
tgtttgtagccctgcactcctactc

SEQ ID NO: 3481 - DNA, 25 bp, Homo sapiens
gtttgtagccctgcactcctactca

SEQ ID NO: 3482 - DNA, 25 bp, Homo sapiens
tttgtagccctgcactcctactcag

SEQ ID NO: 3483 - DNA, 25 bp, Homo sapiens
ttgtagccctgcactcctactcagc

SEQ ID NO: 3484 - DNA, 25 bp, Homo sapiens
tgtagccctgcactcctactcagcc

SEQ ID NO: 3485 - DNA, 25 bp, Homo sapiens
gtagccctgcactcctactcagccc

SEQ ID NO: 3486 - DNA, 25 bp, Homo sapiens
tagccctgcactcctactcagccca

SEQ ID NO: 3487 - DNA, 25 bp, Homo sapiens
agccctgcactcctactcagcccat

SEQ ID NO: 3488 - DNA, 25 bp, Homo sapiens
gccctgcactcctactcagcccatg

SEQ ID NO: 3489 - DNA, 25 bp, Homo sapiens
ccctgcactcctactcagcccatgg

SEQ ID NO: 3490 - DNA, 25 bp, Homo sapiens
cctgcactcctactcagcccatgga

SEQ ID NO: 3491 - DNA, 25 bp, Homo sapiens
ctgcactcctactcagcccatggac

SEQ ID NO: 3492 - DNA, 25 bp, Homo sapiens
tgcactcctactcagcccatggacc

SEQ ID NO: 3493 - DNA, 25 bp, Homo sapiens
gcactcctactcagcccatggaccc

SEQ ID NO: 3494 - DNA, 25 bp, Homo sapiens
cactcctactcagcccatggacccg

SEQ ID NO: 3495 - DNA, 25 bp, Homo sapiens
actcctactcagcccatggacccga

SEQ ID NO: 3496 - DNA, 25 bp, Homo sapiens
ctcctactcagcccatggacccgat

SEQ ID NO: 3497 - DNA, 25 bp, Homo sapiens
tcctactcagcccatggacccgatg

SEQ ID NO: 3498 - DNA, 25 bp, Homo sapiens
cctactcagcccatggacccgatga

SEQ ID NO: 3499 - DNA, 25 bp, Homo sapiens
ctactcagcccatggacccgatgag

SEQ ID NO: 3500 - DNA, 25 bp, Homo sapiens
tactcagcccatggacccgatgagc

SEQ ID NO: 3501 - DNA, 25 bp, Homo sapiens
actcagcccatggacccgatgagct

SEQ ID NO: 3502 - DNA, 25 bp, Homo sapiens
ctcagcccatggacccgatgagctg

SEQ ID NO: 3503 - DNA, 25 bp, Homo sapiens
tcagcccatggacccgatgagctgg

SEQ ID NO: 3504 - DNA, 25 bp, Homo sapiens
cagcccatggacccgatgagctgga

SEQ ID NO: 3505 - DNA, 25 bp, Homo sapiens
agcccatggacccgatgagctggac

SEQ ID NO: 3506 - DNA, 25 bp, Homo sapiens
gcccatggacccgatgagctggacc

SEQ ID NO: 3507 - DNA, 25 bp, Homo sapiens
cccatggacccgatgagctggacct

SEQ ID NO: 3508 - DNA, 25 bp, Homo sapiens
ccatggacccgatgagctggacctg

SEQ ID NO: 3509 - DNA, 25 bp, Homo sapiens
catggacccgatgagctggacctgc

SEQ ID NO: 3510 - DNA, 25 bp, Homo sapiens
atggacccgatgagctggacctgca

SEQ ID NO: 3511 - DNA, 25 bp, Homo sapiens
tggacccgatgagctggacctgcaa

SEQ ID NO: 3512 - DNA, 25 bp, Homo sapiens
ggacccgatgagctggacctgcaaa

SEQ ID NO: 3513 - DNA, 25 bp, Homo sapiens
gacccgatgagctggacctgcaaaa

SEQ ID NO: 3514 - DNA, 25 bp, Homo sapiens
acccgatgagctggacctgcaaaag

SEQ ID NO: 3515 - DNA, 25 bp, Homo sapiens
cccgatgagctggacctgcaaaagg

SEQ ID NO: 3516 - DNA, 25 bp, Homo sapiens
ccgatgagctggacctgcaaaaggg

SEQ ID NO: 3517 - DNA, 25 bp, Homo sapiens
cgatgagctggacctgcaaaaggga

SEQ ID NO: 3518 - DNA, 25 bp, Homo sapiens
gatgagctggacctgcaaaagggag

SEQ ID NO: 3519 - DNA, 25 bp, Homo sapiens
atgagctggacctgcaaaagggaga

SEQ ID NO: 3520 - DNA, 25 bp, Homo sapiens
tgagctggacctgcaaaagggagaa

SEQ ID NO: 3521 - DNA, 25 bp, Homo sapiens
gagctggacctgcaaaagggagaag

SEQ ID NO: 3522 - DNA, 25 bp, Homo sapiens
agctggacctgcaaaagggagaagg

SEQ ID NO: 3523 - DNA, 25 bp, Homo sapiens
gctggacctgcaaaagggagaaggc

SEQ ID NO: 3524 - DNA, 25 bp, Homo sapiens
ctggacctgcaaaagggagaaggcg

SEQ ID NO: 3525 - DNA, 25 bp, Homo sapiens
tggacctgcaaaagggagaaggcgt

SEQ ID NO: 3526 - DNA, 25 bp, Homo sapiens
ggacctgcaaaagggagaaggcgtc

SEQ ID NO: 3527 - DNA, 25 bp, Homo sapiens
gacctgcaaaagggagaaggcgtca

SEQ ID NO: 3528 - DNA, 25 bp, Homo sapiens
acctgcaaaagggagaaggcgtcag

SEQ ID NO: 3529 - DNA, 25 bp, Homo sapiens
cctgcaaaagggagaaggcgtcagg

SEQ ID NO: 3530 - DNA, 25 bp, Homo sapiens
ctgcaaaagggagaaggcgtcaggg

SEQ ID NO: 3531 - DNA, 25 bp, Homo sapiens
tgcaaaagggagaaggcgtcagggt

SEQ ID NO: 3532 - DNA, 25 bp, Homo sapiens
gcaaaagggagaaggcgtcagggtc

SEQ ID NO: 3533 - DNA, 25 bp, Homo sapiens
caaaagggagaaggcgtcagggtcc

SEQ ID NO: 3534 - DNA, 25 bp, Homo sapiens
aaaagggagaaggcgtcagggtcct

SEQ ID NO: 3535 - DNA, 25 bp, Homo sapiens
aaagggagaaggcgtcagggtcctg

SEQ ID NO: 3536 - DNA, 25 bp, Homo sapiens
aagggagaaggcgtcagggtcctgg

SEQ ID NO: 3537 - DNA, 25 bp, Homo sapiens
agggagaaggcgtcagggtcctggg

SEQ ID NO: 3538 - DNA, 25 bp, Homo sapiens
gggagaaggcgtcagggtcctgggg

SEQ ID NO: 3539 - DNA, 25 bp, Homo sapiens
ggagaaggcgtcagggtcctgggga

SEQ ID NO: 3540 - DNA, 25 bp, Homo sapiens
gagaaggcgtcagggtcctggggaa

SEQ ID NO: 3541 - DNA, 25 bp, Homo sapiens
agaaggcgtcagggtcctggggaag

SEQ ID NO: 3542 - DNA, 25 bp, Homo sapiens
gaaggcgtcagggtcctggggaagt

SEQ ID NO: 3543 - DNA, 25 bp, Homo sapiens
aaggcgtcagggtcctggggaagtg

SEQ ID NO: 3544 - DNA, 25 bp, Homo sapiens
aggcgtcagggtcctggggaagtgc

SEQ ID NO: 3545 - DNA, 25 bp, Homo sapiens
ggcgtcagggtcctggggaagtgcc

SEQ ID NO: 3546 - DNA, 25 bp, Homo sapiens
gcgtcagggtcctggggaagtgcca

SEQ ID NO: 3547 - DNA, 25 bp, Homo sapiens
cgtcagggtcctggggaagtgccag

SEQ ID NO: 3548 - DNA, 25 bp, Homo sapiens
gtcagggtcctggggaagtgccagg

SEQ ID NO: 3549 - DNA, 25 bp, Homo sapiens
tcagggtcctggggaagtgccagga

SEQ ID NO: 3550 - DNA, 25 bp, Homo sapiens
cagggtcctggggaagtgccaggac

SEQ ID NO: 3551 - DNA, 25 bp, Homo sapiens
agggtcctggggaagtgccaggacg

SEQ ID NO: 3552 - DNA, 25 bp, Homo sapiens
gggtcctggggaagtgccaggacgg

SEQ ID NO: 3553 - DNA, 25 bp, Homo sapiens
ggtcctggggaagtgccaggacggc

SEQ ID NO: 3554 - DNA, 25 bp, Homo sapiens
gtcctggggaagtgccaggacggct

SEQ ID NO: 3555 - DNA, 25 bp, Homo sapiens
tcctggggaagtgccaggacggctg

SEQ ID NO: 3556 - DNA, 25 bp, Homo sapiens
cctggggaagtgccaggacggctgg

SEQ ID NO: 3557 - DNA, 25 bp, Homo sapiens
ctggggaagtgccaggacggctggc

SEQ ID NO: 3558 - DNA, 25 bp, Homo sapiens
tggggaagtgccaggacggctggct

SEQ ID NO: 3559 - DNA, 25 bp, Homo sapiens
ggggaagtgccaggacggctggctc

SEQ ID NO: 3560 - DNA, 25 bp, Homo sapiens
gggaagtgccaggacggctggctca

SEQ ID NO: 3561 - DNA, 25 bp, Homo sapiens
ggaagtgccaggacggctggctcag

SEQ ID NO: 3562 - DNA, 25 bp, Homo sapiens
gaagtgccaggacggctggctcagg

SEQ ID NO: 3563 - DNA, 25 bp, Homo sapiens
aagtgccaggacggctggctcaggg

SEQ ID NO: 3564 - DNA, 25 bp, Homo sapiens
agtgccaggacggctggctcagggg

SEQ ID NO: 3565 - DNA, 25 bp, Homo sapiens
gtgccaggacggctggctcaggggc

SEQ ID NO: 3566 - DNA, 25 bp, Homo sapiens
tgccaggacggctggctcaggggcg

SEQ ID NO: 3567 - DNA, 25 bp, Homo sapiens
gccaggacggctggctcaggggcgt

SEQ ID NO: 3568 - DNA, 25 bp, Homo sapiens
ccaggacggctggctcaggggcgtc

SEQ ID NO: 3569 - DNA, 25 bp, Homo sapiens
caggacggctggctcaggggcgtct

SEQ ID NO: 3570 - DNA, 25 bp, Homo sapiens
aggacggctggctcaggggcgtctc

SEQ ID NO: 3571 - DNA, 25 bp, Homo sapiens
ggacggctggctcaggggcgtctcc

SEQ ID NO: 3572 - DNA, 25 bp, Homo sapiens
gacggctggctcaggggcgtctcct

SEQ ID NO: 3573 - DNA, 25 bp, Homo sapiens
acggctggctcaggggcgtctcctt

SEQ ID NO: 3574 - DNA, 25 bp, Homo sapiens
cggctggctcaggggcgtctccttg

SEQ ID NO: 3575 - DNA, 25 bp, Homo sapiens
ggctggctcaggggcgtctccttgg

SEQ ID NO: 3576 - DNA, 25 bp, Homo sapiens
gctggctcaggggcgtctccttggt

SEQ ID NO: 3577 - DNA, 25 bp, Homo sapiens
ctggctcaggggcgtctccttggtc

SEQ ID NO: 3578 - DNA, 25 bp, Homo sapiens
tggctcaggggcgtctccttggtca

SEQ ID NO: 3579 - DNA, 25 bp, Homo sapiens
ggctcaggggcgtctccttggtcac

SEQ ID NO: 3580 - DNA, 25 bp, Homo sapiens
gctcaggggcgtctccttggtcacc

SEQ ID NO: 3581 - DNA, 25 bp, Homo sapiens
ctcaggggcgtctccttggtcaccg

SEQ ID NO: 3582 - DNA, 25 bp, Homo sapiens
tcaggggcgtctccttggtcaccgg

SEQ ID NO: 3583 - DNA, 25 bp, Homo sapiens
caggggcgtctccttggtcaccggg

SEQ ID NO: 3584 - DNA, 25 bp, Homo sapiens
aggggcgtctccttggtcaccgggc

SEQ ID NO: 3585 - DNA, 25 bp, Homo sapiens
ggggcgtctccttggtcaccgggcg

SEQ ID NO: 3586 - DNA, 25 bp, Homo sapiens
gggcgtctccttggtcaccgggcga

SEQ ID NO: 3587 - DNA, 25 bp, Homo sapiens
ggcgtctccttggtcaccgggcgag

SEQ ID NO: 3588 - DNA, 25 bp, Homo sapiens
gcgtctccttggtcaccgggcgagt

SEQ ID NO: 3589 - DNA, 25 bp, Homo sapiens
cgtctccttggtcaccgggcgagtc

SEQ ID NO: 3590 - DNA, 25 bp, Homo sapiens
gtctccttggtcaccgggcgagtcg

SEQ ID NO: 3591 - DNA, 25 bp, Homo sapiens
tctccttggtcaccgggcgagtcgg

SEQ ID NO: 3592 - DNA, 25 bp, Homo sapiens
ctccttggtcaccgggcgagtcggc

SEQ ID NO: 3593 - DNA, 25 bp, Homo sapiens
tccttggtcaccgggcgagtcggca

SEQ ID NO: 3594 - DNA, 25 bp, Homo sapiens
ccttggtcaccgggcgagtcggcat

SEQ ID NO: 3595 - DNA, 25 bp, Homo sapiens
cttggtcaccgggcgagtcggcatc

SEQ ID NO: 3596 - DNA, 25 bp, Homo sapiens
ttggtcaccgggcgagtcggcatct

SEQ ID NO: 3597 - DNA, 25 bp, Homo sapiens
tggtcaccgggcgagtcggcatctt

SEQ ID NO: 3598 - DNA, 25 bp, Homo sapiens
ggtcaccgggcgagtcggcatcttc

SEQ ID NO: 3599 - DNA, 25 bp, Homo sapiens
gtcaccgggcgagtcggcatcttcc

SEQ ID NO: 3600 - DNA, 25 bp, Homo sapiens
tcaccgggcgagtcggcatcttccc

SEQ ID NO: 3601 - DNA, 25 bp, Homo sapiens
caccgggcgagtcggcatcttccca

SEQ ID NO: 3602 - DNA, 25 bp, Homo sapiens
accgggcgagtcggcatcttcccaa

SEQ ID NO: 3603 - DNA, 25 bp, Homo sapiens
ccgggcgagtcggcatcttcccaaa

SEQ ID NO: 3604 - DNA, 25 bp, Homo sapiens
cgggcgagtcggcatcttcccaaac

SEQ ID NO: 3605 - DNA, 25 bp, Homo sapiens
gggcgagtcggcatcttcccaaaca

SEQ ID NO: 3606 - DNA, 25 bp, Homo sapiens
ggcgagtcggcatcttcccaaacaa

SEQ ID NO: 3607 - DNA, 25 bp, Homo sapiens
gcgagtcggcatcttcccaaacaat

SEQ ID NO: 3608 - DNA, 25 bp, Homo sapiens
cgagtcggcatcttcccaaacaatt

SEQ ID NO: 3609 - DNA, 25 bp, Homo sapiens
gagtcggcatcttcccaaacaatta

SEQ ID NO: 3610 - DNA, 25 bp, Homo sapiens
agtcggcatcttcccaaacaattac

SEQ ID NO: 3611 - DNA, 25 bp, Homo sapiens
gtcggcatcttcccaaacaattacg

SEQ ID NO: 3612 - DNA, 25 bp, Homo sapiens
tcggcatcttcccaaacaattacgt

SEQ ID NO: 3613 - DNA, 25 bp, Homo sapiens
cggcatcttcccaaacaattacgtc

SEQ ID NO: 3614 - DNA, 25 bp, Homo sapiens
ggcatcttcccaaacaattacgtca

SEQ ID NO: 3615 - DNA, 25 bp, Homo sapiens
gcatcttcccaaacaattacgtcat

SEQ ID NO: 3616 - DNA, 25 bp, Homo sapiens
catcttcccaaacaattacgtcatc

SEQ ID NO: 3617 - DNA, 25 bp, Homo sapiens
atcttcccaaacaattacgtcatcc

SEQ ID NO: 3618 - DNA, 25 bp, Homo sapiens
tcttcccaaacaattacgtcatccc

SEQ ID NO: 3619 - DNA, 25 bp, Homo sapiens
cttcccaaacaattacgtcatcccc

SEQ ID NO: 3620 - DNA, 25 bp, Homo sapiens
ttcccaaacaattacgtcatcccca

SEQ ID NO: 3621 - DNA, 25 bp, Homo sapiens
tcccaaacaattacgtcatccccat

SEQ ID NO: 3622 - DNA, 25 bp, Homo sapiens
cccaaacaattacgtcatccccatt

SEQ ID NO: 3623 - DNA, 25 bp, Homo sapiens
ccaaacaattacgtcatccccattt

SEQ ID NO: 3624 - DNA, 25 bp, Homo sapiens
caaacaattacgtcatccccatttt

SEQ ID NO: 3625 - DNA, 25 bp, Homo sapiens
aaacaattacgtcatccccattttc

SEQ ID NO: 3626 - DNA, 25 bp, Homo sapiens
aacaattacgtcatccccattttca

SEQ ID NO: 3627 - DNA, 25 bp, Homo sapiens
acaattacgtcatccccattttcag

SEQ ID NO: 3628 - DNA, 25 bp, Homo sapiens
caattacgtcatccccattttcaga

SEQ ID NO: 3629 - DNA, 25 bp, Homo sapiens
aattacgtcatccccattttcagaa

SEQ ID NO: 3630 - DNA, 25 bp, Homo sapiens
attacgtcatccccattttcagaaa

SEQ ID NO: 3631 - DNA, 25 bp, Homo sapiens
ttacgtcatccccattttcagaaag

SEQ ID NO: 3632 - DNA, 25 bp, Homo sapiens
tacgtcatccccattttcagaaaga

SEQ ID NO: 3633 - DNA, 25 bp, Homo sapiens
acgtcatccccattttcagaaagac

SEQ ID NO: 3634 - DNA, 25 bp, Homo sapiens
cgtcatccccattttcagaaagacc

SEQ ID NO: 3635 - DNA, 25 bp, Homo sapiens
gtcatccccattttcagaaagacct

SEQ ID NO: 3636 - DNA, 25 bp, Homo sapiens
tcatccccattttcagaaagacctc

SEQ ID NO: 3637 - DNA, 25 bp, Homo sapiens
catccccattttcagaaagacctct

SEQ ID NO: 3638 - DNA, 25 bp, Homo sapiens
atccccattttcagaaagacctcta

SEQ ID NO: 3639 - DNA, 25 bp, Homo sapiens
tccccattttcagaaagacctctag

SEQ ID NO: 3640 - DNA, 25 bp, Homo sapiens
ccccattttcagaaagacctctagt

SEQ ID NO: 3641 - DNA, 25 bp, Homo sapiens
cccattttcagaaagacctctagtt

SEQ ID NO: 3642 - DNA, 25 bp, Homo sapiens
ccattttcagaaagacctctagttt

SEQ ID NO: 3643 - DNA, 25 bp, Homo sapiens
cattttcagaaagacctctagtttt

SEQ ID NO: 3644 - DNA, 25 bp, Homo sapiens
attttcagaaagacctctagttttc

SEQ ID NO: 3645 - DNA, 25 bp, Homo sapiens
ttttcagaaagacctctagttttcc

SEQ ID NO: 3646 - DNA, 25 bp, Homo sapiens
tttcagaaagacctctagttttcca

SEQ ID NO: 3647 - DNA, 25 bp, Homo sapiens
ttcagaaagacctctagttttccag

SEQ ID NO: 3648 - DNA, 25 bp, Homo sapiens
tcagaaagacctctagttttccaga

SEQ ID NO: 3649 - DNA, 25 bp, Homo sapiens
cagaaagacctctagttttccagac

SEQ ID NO: 3650 - DNA, 25 bp, Homo sapiens
agaaagacctctagttttccagact

SEQ ID NO: 3651 - DNA, 25 bp, Homo sapiens
gaaagacctctagttttccagactc

SEQ ID NO: 3652 - DNA, 25 bp, Homo sapiens
aaagacctctagttttccagactcc

SEQ ID NO: 3653 - DNA, 25 bp, Homo sapiens
aagacctctagttttccagactccc

SEQ ID NO: 3654 - DNA, 25 bp, Homo sapiens
agacctctagttttccagactcccg

SEQ ID NO: 3655 - DNA, 25 bp, Homo sapiens
gacctctagttttccagactcccgg

SEQ ID NO: 3656 - DNA, 25 bp, Homo sapiens
acctctagttttccagactcccgga

SEQ ID NO: 3657 - DNA, 25 bp, Homo sapiens
cctctagttttccagactcccggag

SEQ ID NO: 3658 - DNA, 25 bp, Homo sapiens
ctctagttttccagactcccggagc

SEQ ID NO: 3659 - DNA, 25 bp, Homo sapiens
tctagttttccagactcccggagcc

SEQ ID NO: 3660 - DNA, 25 bp, Homo sapiens
ctagttttccagactcccggagccc

SEQ ID NO: 3661 - DNA, 25 bp, Homo sapiens
tagttttccagactcccggagccct

SEQ ID NO: 3662 - DNA, 25 bp, Homo sapiens
agttttccagactcccggagccctg

SEQ ID NO: 3663 - DNA, 25 bp, Homo sapiens
gttttccagactcccggagccctgg

SEQ ID NO: 3664 - DNA, 25 bp, Homo sapiens
ttttccagactcccggagccctggt

SEQ ID NO: 3665 - DNA, 25 bp, Homo sapiens
tttccagactcccggagccctggtc

SEQ ID NO: 3666 - DNA, 25 bp, Homo sapiens
ttccagactcccggagccctggtct

SEQ ID NO: 3667 - DNA, 25 bp, Homo sapiens
tccagactcccggagccctggtctc

SEQ ID NO: 3668 - DNA, 25 bp, Homo sapiens
ccagactcccggagccctggtctct

SEQ ID NO: 3669 - DNA, 25 bp, Homo sapiens
cagactcccggagccctggtctcta

SEQ ID NO: 3670 - DNA, 25 bp, Homo sapiens
agactcccggagccctggtctctac

SEQ ID NO: 3671 - DNA, 25 bp, Homo sapiens
gactcccggagccctggtctctaca

SEQ ID NO: 3672 - DNA, 25 bp, Homo sapiens
actcccggagccctggtctctacac

SEQ ID NO: 3673 - DNA, 25 bp, Homo sapiens
ctcccggagccctggtctctacacc

SEQ ID NO: 3674 - DNA, 25 bp, Homo sapiens
tcccggagccctggtctctacacca

SEQ ID NO: 3675 - DNA, 25 bp, Homo sapiens
cccggagccctggtctctacaccac

SEQ ID NO: 3676 - DNA, 25 bp, Homo sapiens
ccggagccctggtctctacaccaca

SEQ ID NO: 3677 - DNA, 25 bp, Homo sapiens
cggagccctggtctctacaccacat

SEQ ID NO: 3678 - DNA, 25 bp, Homo sapiens
ggagccctggtctctacaccacatg

SEQ ID NO: 3679 - DNA, 25 bp, Homo sapiens
gagccctggtctctacaccacatgg

SEQ ID NO: 3680 - DNA, 25 bp, Homo sapiens
agccctggtctctacaccacatgga

SEQ ID NO: 3681 - DNA, 25 bp, Homo sapiens
gccctggtctctacaccacatggac

SEQ ID NO: 3682 - DNA, 25 bp, Homo sapiens
ccctggtctctacaccacatggacg

SEQ ID NO: 3683 - DNA, 25 bp, Homo sapiens
cctggtctctacaccacatggacgt

SEQ ID NO: 3684 - DNA, 25 bp, Homo sapiens
ctggtctctacaccacatggacgtt

SEQ ID NO: 3685 - DNA, 25 bp, Homo sapiens
tggtctctacaccacatggacgtta

SEQ ID NO: 3686 - DNA, 25 bp, Homo sapiens
ggtctctacaccacatggacgttat

SEQ ID NO: 3687 - DNA, 25 bp, Homo sapiens
gtctctacaccacatggacgttatc

SEQ ID NO: 3688 - DNA, 25 bp, Homo sapiens
tctctacaccacatggacgttatcc

SEQ ID NO: 3689 - DNA, 25 bp, Homo sapiens
ctctacaccacatggacgttatcca

SEQ ID NO: 3690 - DNA, 25 bp, Homo sapiens
tctacaccacatggacgttatccac

SEQ ID NO: 3691 - DNA, 25 bp, Homo sapiens
ctacaccacatggacgttatccacc

SEQ ID NO: 3692 - DNA, 25 bp, Homo sapiens
tacaccacatggacgttatccacct

SEQ ID NO: 3693 - DNA, 25 bp, Homo sapiens
acaccacatggacgttatccacctc

SEQ ID NO: 3694 - DNA, 25 bp, Homo sapiens
caccacatggacgttatccacctcc

SEQ ID NO: 3695 - DNA, 25 bp, Homo sapiens
accacatggacgttatccacctcct

SEQ ID NO: 3696 - DNA, 25 bp, Homo sapiens
ccacatggacgttatccacctcctc

SEQ ID NO: 3697 - DNA, 25 bp, Homo sapiens
cacatggacgttatccacctcctct

SEQ ID NO: 3698 - DNA, 25 bp, Homo sapiens
acatggacgttatccacctcctctg

SEQ ID NO: 3699 - DNA, 25 bp, Homo sapiens
catggacgttatccacctcctctgt

SEQ ID NO: 3700 - DNA, 25 bp, Homo sapiens
atggacgttatccacctcctctgtg

SEQ ID NO: 3701 - DNA, 25 bp, Homo sapiens
tggacgttatccacctcctctgtgt

SEQ ID NO: 3702 - DNA, 25 bp, Homo sapiens
ggacgttatccacctcctctgtgtc

SEQ ID NO: 3703 - DNA, 25 bp, Homo sapiens
gacgttatccacctcctctgtgtcc

SEQ ID NO: 3704 - DNA, 25 bp, Homo sapiens
acgttatccacctcctctgtgtcct

SEQ ID NO: 3705 - DNA, 25 bp, Homo sapiens
cgttatccacctcctctgtgtcctc

SEQ ID NO: 3706 - DNA, 25 bp, Homo sapiens
gttatccacctcctctgtgtcctcc

SEQ ID NO: 3707 - DNA, 25 bp, Homo sapiens
ttatccacctcctctgtgtcctccc

SEQ ID NO: 3708 - DNA, 25 bp, Homo sapiens
tatccacctcctctgtgtcctccca

SEQ ID NO: 3709 - DNA, 25 bp, Homo sapiens
atccacctcctctgtgtcctcccaa

SEQ ID NO: 3710 - DNA, 25 bp, Homo sapiens
tccacctcctctgtgtcctcccaag

SEQ ID NO: 3711 - DNA, 25 bp, Homo sapiens
ccacctcctctgtgtcctcccaagg

SEQ ID NO: 3712 - DNA, 25 bp, Homo sapiens
cacctcctctgtgtcctcccaaggc

SEQ ID NO: 3713 - DNA, 25 bp, Homo sapiens
acctcctctgtgtcctcccaaggca

SEQ ID NO: 3714 - DNA, 25 bp, Homo sapiens
cctcctctgtgtcctcccaaggcag

SEQ ID NO: 3715 - DNA, 25 bp, Homo sapiens
ctcctctgtgtcctcccaaggcagc

SEQ ID NO: 3716 - DNA, 25 bp, Homo sapiens
tcctctgtgtcctcccaaggcagca

SEQ ID NO: 3717 - DNA, 25 bp, Homo sapiens
cctctgtgtcctcccaaggcagcat

SEQ ID NO: 3718 - DNA, 25 bp, Homo sapiens
ctctgtgtcctcccaaggcagcatt

SEQ ID NO: 3719 - DNA, 25 bp, Homo sapiens
tctgtgtcctcccaaggcagcattt

SEQ ID NO: 3720 - DNA, 25 bp, Homo sapiens
ctgtgtcctcccaaggcagcatttc

SEQ ID NO: 3721 - DNA, 25 bp, Homo sapiens
tgtgtcctcccaaggcagcatttca

SEQ ID NO: 3722 - DNA, 25 bp, Homo sapiens
gtgtcctcccaaggcagcatttcag

SEQ ID NO: 3723 - DNA, 25 bp, Homo sapiens
tgtcctcccaaggcagcatttcaga

SEQ ID NO: 3724 - DNA, 25 bp, Homo sapiens
gtcctcccaaggcagcatttcagaa

SEQ ID NO: 3725 - DNA, 25 bp, Homo sapiens
tcctcccaaggcagcatttcagaag

SEQ ID NO: 3726 - DNA, 25 bp, Homo sapiens
cctcccaaggcagcatttcagaagg

SEQ ID NO: 3727 - DNA, 25 bp, Homo sapiens
ctcccaaggcagcatttcagaaggt

SEQ ID NO: 3728 - DNA, 25 bp, Homo sapiens
tcccaaggcagcatttcagaaggtg

SEQ ID NO: 3729 - DNA, 25 bp, Homo sapiens
cccaaggcagcatttcagaaggtga

SEQ ID NO: 3730 - DNA, 25 bp, Homo sapiens
ccaaggcagcatttcagaaggtgat

SEQ ID NO: 3731 - DNA, 25 bp, Homo sapiens
caaggcagcatttcagaaggtgatc

SEQ ID NO: 3732 - DNA, 25 bp, Homo sapiens
aaggcagcatttcagaaggtgatcc

SEQ ID NO: 3733 - DNA, 25 bp, Homo sapiens
aggcagcatttcagaaggtgatcca

SEQ ID NO: 3734 - DNA, 25 bp, Homo sapiens
ggcagcatttcagaaggtgatccac

SEQ ID NO: 3735 - DNA, 25 bp, Homo sapiens
gcagcatttcagaaggtgatccacg

SEQ ID NO: 3736 - DNA, 25 bp, Homo sapiens
cagcatttcagaaggtgatccacgg

SEQ ID NO: 3737 - DNA, 25 bp, Homo sapiens
agcatttcagaaggtgatccacggc

SEQ ID NO: 3738 - DNA, 25 bp, Homo sapiens
gcatttcagaaggtgatccacggca

SEQ ID NO: 3739 - DNA, 25 bp, Homo sapiens
catttcagaaggtgatccacggcaa

SEQ ID NO: 3740 - DNA, 25 bp, Homo sapiens
atttcagaaggtgatccacggcaaa

SEQ ID NO: 3741 - DNA, 25 bp, Homo sapiens
tttcagaaggtgatccacggcaaag

SEQ ID NO: 3742 - DNA, 25 bp, Homo sapiens
ttcagaaggtgatccacggcaaagc

SEQ ID NO: 3743 - DNA, 25 bp, Homo sapiens
tcagaaggtgatccacggcaaagcc

SEQ ID NO: 3744 - DNA, 25 bp, Homo sapiens
cagaaggtgatccacggcaaagccg

SEQ ID NO: 3745 - DNA, 25 bp, Homo sapiens
agaaggtgatccacggcaaagccgt

SEQ ID NO: 3746 - DNA, 25 bp, Homo sapiens
gaaggtgatccacggcaaagccgtc

SEQ ID NO: 3747 - DNA, 25 bp, Homo sapiens
aaggtgatccacggcaaagccgtcc

SEQ ID NO: 3748 - DNA, 25 bp, Homo sapiens
aggtgatccacggcaaagccgtccc

SEQ ID NO: 3749 - DNA, 25 bp, Homo sapiens
ggtgatccacggcaaagccgtccct

SEQ ID NO: 3750 - DNA, 25 bp, Homo sapiens
gtgatccacggcaaagccgtccctt

SEQ ID NO: 3751 - DNA, 25 bp, Homo sapiens
tgatccacggcaaagccgtcccttc

SEQ ID NO: 3752 - DNA, 25 bp, Homo sapiens
gatccacggcaaagccgtcccttca

SEQ ID NO: 3753 - DNA, 25 bp, Homo sapiens
atccacggcaaagccgtcccttcaa

SEQ ID NO: 3754 - DNA, 25 bp, Homo sapiens
tccacggcaaagccgtcccttcaaa

SEQ ID NO: 3755 - DNA, 25 bp, Homo sapiens
ccacggcaaagccgtcccttcaaat

SEQ ID NO: 3756 - DNA, 25 bp, Homo sapiens
cacggcaaagccgtcccttcaaatc

SEQ ID NO: 3757 - DNA, 25 bp, Homo sapiens
acggcaaagccgtcccttcaaatcc

SEQ ID NO: 3758 - DNA, 25 bp, Homo sapiens
cggcaaagccgtcccttcaaatccg

SEQ ID NO: 3759 - DNA, 25 bp, Homo sapiens
ggcaaagccgtcccttcaaatccgt

SEQ ID NO: 3760 - DNA, 25 bp, Homo sapiens
gcaaagccgtcccttcaaatccgtc

SEQ ID NO: 3761 - DNA, 25 bp, Homo sapiens
caaagccgtcccttcaaatccgtct

SEQ ID NO: 3762 - DNA, 25 bp, Homo sapiens
aaagccgtcccttcaaatccgtctt

SEQ ID NO: 3763 - DNA, 25 bp, Homo sapiens
aagccgtcccttcaaatccgtcttt

SEQ ID NO: 3764 - DNA, 25 bp, Homo sapiens
agccgtcccttcaaatccgtctttg

SEQ ID NO: 3765 - DNA, 25 bp, Homo sapiens
gccgtcccttcaaatccgtctttgt

SEQ ID NO: 3766 - DNA, 25 bp, Homo sapiens
ccgtcccttcaaatccgtctttgtg

SEQ ID NO: 3767 - DNA, 25 bp, Homo sapiens
cgtcccttcaaatccgtctttgtgc

SEQ ID NO: 3768 - DNA, 25 bp, Homo sapiens
gtcccttcaaatccgtctttgtgcc

SEQ ID NO: 3769 - DNA, 25 bp, Homo sapiens
tcccttcaaatccgtctttgtgccc

SEQ ID NO: 3770 - DNA, 25 bp, Homo sapiens
cccttcaaatccgtctttgtgccca

SEQ ID NO: 3771 - DNA, 25 bp, Homo sapiens
ccttcaaatccgtctttgtgcccac

SEQ ID NO: 3772 - DNA, 25 bp, Homo sapiens
cttcaaatccgtctttgtgcccact

SEQ ID NO: 3773 - DNA, 25 bp, Homo sapiens
ttcaaatccgtctttgtgcccactg

SEQ ID NO: 3774 - DNA, 25 bp, Homo sapiens
tcaaatccgtctttgtgcccactgc

SEQ ID NO: 3775 - DNA, 25 bp, Homo sapiens
caaatccgtctttgtgcccactgcc

SEQ ID NO: 3776 - DNA, 25 bp, Homo sapiens
aaatccgtctttgtgcccactgcca

SEQ ID NO: 3777 - DNA, 25 bp, Homo sapiens
aatccgtctttgtgcccactgccat

SEQ ID NO: 3778 - DNA, 25 bp, Homo sapiens
atccgtctttgtgcccactgccata

SEQ ID NO: 3779 - DNA, 25 bp, Homo sapiens
tccgtctttgtgcccactgccatag

SEQ ID NO: 3780 - DNA, 25 bp, Homo sapiens
ccgtctttgtgcccactgccatagt

SEQ ID NO: 3781 - DNA, 25 bp, Homo sapiens
cgtctttgtgcccactgccatagtc

SEQ ID NO: 3782 - DNA, 25 bp, Homo sapiens
gtctttgtgcccactgccatagtca

SEQ ID NO: 3783 - DNA, 25 bp, Homo sapiens
tctttgtgcccactgccatagtcaa

SEQ ID NO: 3784 - DNA, 25 bp, Homo sapiens
ctttgtgcccactgccatagtcaac

SEQ ID NO: 3785 - DNA, 25 bp, Homo sapiens
tttgtgcccactgccatagtcaacc

SEQ ID NO: 3786 - DNA, 25 bp, Homo sapiens
ttgtgcccactgccatagtcaaccc

SEQ ID NO: 3787 - DNA, 25 bp, Homo sapiens
tgtgcccactgccatagtcaacccc

SEQ ID NO: 3788 - DNA, 25 bp, Homo sapiens
gtgcccactgccatagtcaaccccg

SEQ ID NO: 3789 - DNA, 25 bp, Homo sapiens
tgcccactgccatagtcaaccccgt

SEQ ID NO: 3790 - DNA, 25 bp, Homo sapiens
gcccactgccatagtcaaccccgtg

SEQ ID NO: 3791 - DNA, 25 bp, Homo sapiens
cccactgccatagtcaaccccgtga

SEQ ID NO: 3792 - DNA, 25 bp, Homo sapiens
ccactgccatagtcaaccccgtgag

SEQ ID NO: 3793 - DNA, 25 bp, Homo sapiens
cactgccatagtcaaccccgtgaga

SEQ ID NO: 3794 - DNA, 25 bp, Homo sapiens
actgccatagtcaaccccgtgagaa

SEQ ID NO: 3795 - DNA, 25 bp, Homo sapiens
ctgccatagtcaaccccgtgagaag

SEQ ID NO: 3796 - DNA, 25 bp, Homo sapiens
tgccatagtcaaccccgtgagaagc

SEQ ID NO: 3797 - DNA, 25 bp, Homo sapiens
gccatagtcaaccccgtgagaagca

SEQ ID NO: 3798 - DNA, 25 bp, Homo sapiens
ccatagtcaaccccgtgagaagcac

SEQ ID NO: 3799 - DNA, 25 bp, Homo sapiens
catagtcaaccccgtgagaagcaca

SEQ ID NO: 3800 - DNA, 25 bp, Homo sapiens
atagtcaaccccgtgagaagcacag

SEQ ID NO: 3801 - DNA, 25 bp, Homo sapiens
tagtcaaccccgtgagaagcacagc

SEQ ID NO: 3802 - DNA, 25 bp, Homo sapiens
agtcaaccccgtgagaagcacagcc

SEQ ID NO: 3803 - DNA, 25 bp, Homo sapiens
gtcaaccccgtgagaagcacagccg

SEQ ID NO: 3804 - DNA, 25 bp, Homo sapiens
tcaaccccgtgagaagcacagccgg

SEQ ID NO: 3805 - DNA, 25 bp, Homo sapiens
caaccccgtgagaagcacagccggc

SEQ ID NO: 3806 - DNA, 25 bp, Homo sapiens
aaccccgtgagaagcacagccggcc

SEQ ID NO: 3807 - DNA, 25 bp, Homo sapiens
accccgtgagaagcacagccggccc

SEQ ID NO: 3808 - DNA, 25 bp, Homo sapiens
ccccgtgagaagcacagccggccct

SEQ ID NO: 3809 - DNA, 25 bp, Homo sapiens
cccgtgagaagcacagccggccctg

SEQ ID NO: 3810 - DNA, 25 bp, Homo sapiens
ccgtgagaagcacagccggccctgg

SEQ ID NO: 3811 - DNA, 25 bp, Homo sapiens
cgtgagaagcacagccggccctggg

SEQ ID NO: 3812 - DNA, 25 bp, Homo sapiens
gtgagaagcacagccggccctggga

SEQ ID NO: 3813 - DNA, 25 bp, Homo sapiens
tgagaagcacagccggccctgggac

SEQ ID NO: 3814 - DNA, 25 bp, Homo sapiens
gagaagcacagccggccctgggact

SEQ ID NO: 3815 - DNA, 25 bp, Homo sapiens
agaagcacagccggccctgggactt

SEQ ID NO: 3816 - DNA, 25 bp, Homo sapiens
gaagcacagccggccctgggacttt

SEQ ID NO: 3817 - DNA, 25 bp, Homo sapiens
aagcacagccggccctgggacttta

SEQ ID NO: 3818 - DNA, 25 bp, Homo sapiens
agcacagccggccctgggactttag

SEQ ID NO: 3819 - DNA, 25 bp, Homo sapiens
gcacagccggccctgggactttagg

SEQ ID NO: 3820 - DNA, 25 bp, Homo sapiens
cacagccggccctgggactttagga

SEQ ID NO: 3821 - DNA, 25 bp, Homo sapiens
acagccggccctgggactttaggac

SEQ ID NO: 3822 - DNA, 25 bp, Homo sapiens
cagccggccctgggactttaggaca

SEQ ID NO: 3823 - DNA, 25 bp, Homo sapiens
agccggccctgggactttaggacaa

SEQ ID NO: 3824 - DNA, 25 bp, Homo sapiens
gccggccctgggactttaggacaag

SEQ ID NO: 3825 - DNA, 25 bp, Homo sapiens
ccggccctgggactttaggacaagg

SEQ ID NO: 3826 - DNA, 25 bp, Homo sapiens
cggccctgggactttaggacaaggg

SEQ ID NO: 3827 - DNA, 25 bp, Homo sapiens
ggccctgggactttaggacaagggt

SEQ ID NO: 3828 - DNA, 25 bp, Homo sapiens
gccctgggactttaggacaagggtc

SEQ ID NO: 3829 - DNA, 25 bp, Homo sapiens
ccctgggactttaggacaagggtct

SEQ ID NO: 3830 - DNA, 25 bp, Homo sapiens
cctgggactttaggacaagggtctc

SEQ ID NO: 3831 - DNA, 25 bp, Homo sapiens
ctgggactttaggacaagggtctct

SEQ ID NO: 3832 - DNA, 25 bp, Homo sapiens
tgggactttaggacaagggtctctt

SEQ ID NO: 3833 - DNA, 25 bp, Homo sapiens
gggactttaggacaagggtctcttc

SEQ ID NO: 3834 - DNA, 25 bp, Homo sapiens
ggactttaggacaagggtctcttcg

SEQ ID NO: 3835 - DNA, 25 bp, Homo sapiens
gactttaggacaagggtctcttcgg

SEQ ID NO: 3836 - DNA, 25 bp, Homo sapiens
actttaggacaagggtctcttcgga

SEQ ID NO: 3837 - DNA, 25 bp, Homo sapiens
ctttaggacaagggtctcttcggaa

SEQ ID NO: 3838 - DNA, 25 bp, Homo sapiens
tttaggacaagggtctcttcggaaa

SEQ ID NO: 3839 - DNA, 25 bp, Homo sapiens
ttaggacaagggtctcttcggaaag

SEQ ID NO: 3840 - DNA, 25 bp, Homo sapiens
taggacaagggtctcttcggaaagg

SEQ ID NO: 3841 - DNA, 25 bp, Homo sapiens
aggacaagggtctcttcggaaaggg

SEQ ID NO: 3842 - DNA, 25 bp, Homo sapiens
ggacaagggtctcttcggaaagggc

SEQ ID NO: 3843 - DNA, 25 bp, Homo sapiens
gacaagggtctcttcggaaagggcg

SEQ ID NO: 3844 - DNA, 25 bp, Homo sapiens
acaagggtctcttcggaaagggcgg

SEQ ID NO: 3845 - DNA, 25 bp, Homo sapiens
caagggtctcttcggaaagggcgga

SEQ ID NO: 3846 - DNA, 25 bp, Homo sapiens
aagggtctcttcggaaagggcggag

SEQ ID NO: 3847 - DNA, 25 bp, Homo sapiens
agggtctcttcggaaagggcggagc

SEQ ID NO: 3848 - DNA, 25 bp, Homo sapiens
gggtctcttcggaaagggcggagca

SEQ ID NO: 3849 - DNA, 25 bp, Homo sapiens
ggtctcttcggaaagggcggagcag

SEQ ID NO: 3850 - DNA, 25 bp, Homo sapiens
gtctcttcggaaagggcggagcagc

SEQ ID NO: 3851 - DNA, 25 bp, Homo sapiens
tctcttcggaaagggcggagcagca

SEQ ID NO: 3852 - DNA, 25 bp, Homo sapiens
ctcttcggaaagggcggagcagcat

SEQ ID NO: 3853 - DNA, 25 bp, Homo sapiens
tcttcggaaagggcggagcagcatg

SEQ ID NO: 3854 - DNA, 25 bp, Homo sapiens
cttcggaaagggcggagcagcatga

SEQ ID NO: 3855 - DNA, 25 bp, Homo sapiens
ttcggaaagggcggagcagcatgag

SEQ ID NO: 3856 - DNA, 25 bp, Homo sapiens
tcggaaagggcggagcagcatgaga

SEQ ID NO: 3857 - DNA, 25 bp, Homo sapiens
cggaaagggcggagcagcatgagaa

SEQ ID NO: 3858 - DNA, 25 bp, Homo sapiens
ggaaagggcggagcagcatgagaaa

SEQ ID NO: 3859 - DNA, 25 bp, Homo sapiens
gaaagggcggagcagcatgagaaag

SEQ ID NO: 3860 - DNA, 25 bp, Homo sapiens
aaagggcggagcagcatgagaaaga

SEQ ID NO: 3861 - DNA, 25 bp, Homo sapiens
aagggcggagcagcatgagaaagaa

SEQ ID NO: 3862 - DNA, 25 bp, Homo sapiens
agggcggagcagcatgagaaagaat

SEQ ID NO: 3863 - DNA, 25 bp, Homo sapiens
gggcggagcagcatgagaaagaatg

SEQ ID NO: 3864 - DNA, 25 bp, Homo sapiens
ggcggagcagcatgagaaagaatgg

SEQ ID NO: 3865 - DNA, 25 bp, Homo sapiens
gcggagcagcatgagaaagaatgga

SEQ ID NO: 3866 - DNA, 25 bp, Homo sapiens
cggagcagcatgagaaagaatggat

SEQ ID NO: 3867 - DNA, 25 bp, Homo sapiens
ggagcagcatgagaaagaatggatc

SEQ ID NO: 3868 - DNA, 25 bp, Homo sapiens
gagcagcatgagaaagaatggatcc

SEQ ID NO: 3869 - DNA, 25 bp, Homo sapiens
agcagcatgagaaagaatggatccc

SEQ ID NO: 3870 - DNA, 25 bp, Homo sapiens
gcagcatgagaaagaatggatccct

SEQ ID NO: 3871 - DNA, 25 bp, Homo sapiens
cagcatgagaaagaatggatccctg

SEQ ID NO: 3872 - DNA, 25 bp, Homo sapiens
agcatgagaaagaatggatccctgc

SEQ ID NO: 3873 - DNA, 25 bp, Homo sapiens
gcatgagaaagaatggatccctgca

SEQ ID NO: 3874 - DNA, 25 bp, Homo sapiens
catgagaaagaatggatccctgcag

SEQ ID NO: 3875 - DNA, 25 bp, Homo sapiens
atgagaaagaatggatccctgcaga

SEQ ID NO: 3876 - DNA, 25 bp, Homo sapiens
tgagaaagaatggatccctgcagag

SEQ ID NO: 3877 - DNA, 25 bp, Homo sapiens
gagaaagaatggatccctgcagaga

SEQ ID NO: 3878 - DNA, 25 bp, Homo sapiens
agaaagaatggatccctgcagagac

SEQ ID NO: 3879 - DNA, 25 bp, Homo sapiens
gaaagaatggatccctgcagagacc

SEQ ID NO: 3880 - DNA, 25 bp, Homo sapiens
aaagaatggatccctgcagagaccc

SEQ ID NO: 3881 - DNA, 25 bp, Homo sapiens
aagaatggatccctgcagagacccc

SEQ ID NO: 3882 - DNA, 25 bp, Homo sapiens
agaatggatccctgcagagacccct

SEQ ID NO: 3883 - DNA, 25 bp, Homo sapiens
gaatggatccctgcagagacccctc

SEQ ID NO: 3884 - DNA, 25 bp, Homo sapiens
aatggatccctgcagagacccctcc

SEQ ID NO: 3885 - DNA, 25 bp, Homo sapiens
atggatccctgcagagacccctcca

SEQ ID NO: 3886 - DNA, 25 bp, Homo sapiens
tggatccctgcagagacccctccag

SEQ ID NO: 3887 - DNA, 25 bp, Homo sapiens
ggatccctgcagagacccctccagt

SEQ ID NO: 3888 - DNA, 25 bp, Homo sapiens
gatccctgcagagacccctccagtc

SEQ ID NO: 3889 - DNA, 25 bp, Homo sapiens
atccctgcagagacccctccagtcc

SEQ ID NO: 3890 - DNA, 25 bp, Homo sapiens
tccctgcagagacccctccagtccg

SEQ ID NO: 3891 - DNA, 25 bp, Homo sapiens
ccctgcagagacccctccagtccgg

SEQ ID NO: 3892 - DNA, 25 bp, Homo sapiens
cctgcagagacccctccagtccggg

SEQ ID NO: 3893 - DNA, 25 bp, Homo sapiens
ctgcagagacccctccagtccggga

SEQ ID NO: 3894 - DNA, 25 bp, Homo sapiens
tgcagagacccctccagtccgggat

SEQ ID NO: 3895 - DNA, 25 bp, Homo sapiens
gcagagacccctccagtccgggatc

SEQ ID NO: 3896 - DNA, 25 bp, Homo sapiens
cagagacccctccagtccgggatcc

SEQ ID NO: 3897 - DNA, 25 bp, Homo sapiens
agagacccctccagtccgggatccc

SEQ ID NO: 3898 - DNA, 25 bp, Homo sapiens
gagacccctccagtccgggatcccc

SEQ ID NO: 3899 - DNA, 25 bp, Homo sapiens
agacccctccagtccgggatcccca

SEQ ID NO: 3900 - DNA, 25 bp, Homo sapiens
gacccctccagtccgggatccccac

SEQ ID NO: 3901 - DNA, 25 bp, Homo sapiens
acccctccagtccgggatccccact

SEQ ID NO: 3902 - DNA, 25 bp, Homo sapiens
cccctccagtccgggatccccactc

SEQ ID NO: 3903 - DNA, 25 bp, Homo sapiens
ccctccagtccgggatccccactct

SEQ ID NO: 3904 - DNA, 25 bp, Homo sapiens
cctccagtccgggatccccactctc

SEQ ID NO: 3905 - DNA, 25 bp, Homo sapiens
ctccagtccgggatccccactctcg

SEQ ID NO: 3906 - DNA, 25 bp, Homo sapiens
tccagtccgggatccccactctcgt

SEQ ID NO: 3907 - DNA, 25 bp, Homo sapiens
ccagtccgggatccccactctcgtg

SEQ ID NO: 3908 - DNA, 25 bp, Homo sapiens
cagtccgggatccccactctcgtgg

SEQ ID NO: 3909 - DNA, 25 bp, Homo sapiens
agtccgggatccccactctcgtggt

SEQ ID NO: 3910 - DNA, 25 bp, Homo sapiens
gtccgggatccccactctcgtggta

SEQ ID NO: 3911 - DNA, 25 bp, Homo sapiens
tccgggatccccactctcgtggtag

SEQ ID NO: 3912 - DNA, 25 bp, Homo sapiens
ccgggatccccactctcgtggtagg

SEQ ID NO: 3913 - DNA, 25 bp, Homo sapiens
cgggatccccactctcgtggtaggc

SEQ ID NO: 3914 - DNA, 25 bp, Homo sapiens
gggatccccactctcgtggtaggct

SEQ ID NO: 3915 - DNA, 25 bp, Homo sapiens
ggatccccactctcgtggtaggctc

SEQ ID NO: 3916 - DNA, 25 bp, Homo sapiens
gatccccactctcgtggtaggctcc

SEQ ID NO: 3917 - DNA, 25 bp, Homo sapiens
atccccactctcgtggtaggctccc

SEQ ID NO: 3918 - DNA, 25 bp, Homo sapiens
tccccactctcgtggtaggctccct

SEQ ID NO: 3919 - DNA, 25 bp, Homo sapiens
ccccactctcgtggtaggctccctc

SEQ ID NO: 3920 - DNA, 25 bp, Homo sapiens
cccactctcgtggtaggctccctca

SEQ ID NO: 3921 - DNA, 25 bp, Homo sapiens
ccactctcgtggtaggctccctcag

SEQ ID NO: 3922 - DNA, 25 bp, Homo sapiens
cactctcgtggtaggctccctcaga

SEQ ID NO: 3923 - DNA, 25 bp, Homo sapiens
actctcgtggtaggctccctcagac

SEQ ID NO: 3924 - DNA, 25 bp, Homo sapiens
ctctcgtggtaggctccctcagacg

SEQ ID NO: 3925 - DNA, 25 bp, Homo sapiens
tctcgtggtaggctccctcagacgc

SEQ ID NO: 3926 - DNA, 25 bp, Homo sapiens
ctcgtggtaggctccctcagacgca

SEQ ID NO: 3927 - DNA, 25 bp, Homo sapiens
tcgtggtaggctccctcagacgcag

SEQ ID NO: 3928 - DNA, 25 bp, Homo sapiens
cgtggtaggctccctcagacgcagc

SEQ ID NO: 3929 - DNA, 25 bp, Homo sapiens
gtggtaggctccctcagacgcagcc

SEQ ID NO: 3930 - DNA, 25 bp, Homo sapiens
tggtaggctccctcagacgcagccc

SEQ ID NO: 3931 - DNA, 25 bp, Homo sapiens
ggtaggctccctcagacgcagcccc

SEQ ID NO: 3932 - DNA, 25 bp, Homo sapiens
gtaggctccctcagacgcagcccca

SEQ ID NO: 3933 - DNA, 25 bp, Homo sapiens
taggctccctcagacgcagccccac

SEQ ID NO: 3934 - DNA, 25 bp, Homo sapiens
aggctccctcagacgcagccccacc

SEQ ID NO: 3935 - DNA, 25 bp, Homo sapiens
ggctccctcagacgcagccccacca

SEQ ID NO: 3936 - DNA, 25 bp, Homo sapiens
gctccctcagacgcagccccaccat

SEQ ID NO: 3937 - DNA, 25 bp, Homo sapiens
ctccctcagacgcagccccaccatg

SEQ ID NO: 3938 - DNA, 25 bp, Homo sapiens
tccctcagacgcagccccaccatgg

SEQ ID NO: 3939 - DNA, 25 bp, Homo sapiens
ccctcagacgcagccccaccatggt

SEQ ID NO: 3940 - DNA, 25 bp, Homo sapiens
cctcagacgcagccccaccatggtc

SEQ ID NO: 3941 - DNA, 25 bp, Homo sapiens
ctcagacgcagccccaccatggtcc

SEQ ID NO: 3942 - DNA, 25 bp, Homo sapiens
tcagacgcagccccaccatggtcct

SEQ ID NO: 3943 - DNA, 25 bp, Homo sapiens
cagacgcagccccaccatggtcctt

SEQ ID NO: 3944 - DNA, 25 bp, Homo sapiens
agacgcagccccaccatggtccttc

SEQ ID NO: 3945 - DNA, 25 bp, Homo sapiens
gacgcagccccaccatggtccttcg

SEQ ID NO: 3946 - DNA, 25 bp, Homo sapiens
acgcagccccaccatggtccttcgg

SEQ ID NO: 3947 - DNA, 25 bp, Homo sapiens
cgcagccccaccatggtccttcggc

SEQ ID NO: 3948 - DNA, 25 bp, Homo sapiens
gcagccccaccatggtccttcggcc

SEQ ID NO: 3949 - DNA, 25 bp, Homo sapiens
cagccccaccatggtccttcggcct

SEQ ID NO: 3950 - DNA, 25 bp, Homo sapiens
agccccaccatggtccttcggcctc

SEQ ID NO: 3951 - DNA, 25 bp, Homo sapiens
gccccaccatggtccttcggcctca

SEQ ID NO: 3952 - DNA, 25 bp, Homo sapiens
ccccaccatggtccttcggcctcag

SEQ ID NO: 3953 - DNA, 25 bp, Homo sapiens
cccaccatggtccttcggcctcagc

SEQ ID NO: 3954 - DNA, 25 bp, Homo sapiens
ccaccatggtccttcggcctcagca

SEQ ID NO: 3955 - DNA, 25 bp, Homo sapiens
caccatggtccttcggcctcagcag

SEQ ID NO: 3956 - DNA, 25 bp, Homo sapiens
accatggtccttcggcctcagcagt

SEQ ID NO: 3957 - DNA, 25 bp, Homo sapiens
ccatggtccttcggcctcagcagtt

SEQ ID NO: 3958 - DNA, 25 bp, Homo sapiens
catggtccttcggcctcagcagttc

SEQ ID NO: 3959 - DNA, 25 bp, Homo sapiens
atggtccttcggcctcagcagttcc

SEQ ID NO: 3960 - DNA, 25 bp, Homo sapiens
tggtccttcggcctcagcagttcca

SEQ ID NO: 3961 - DNA, 25 bp, Homo sapiens
ggtccttcggcctcagcagttccaa

SEQ ID NO: 3962 - DNA, 25 bp, Homo sapiens
gtccttcggcctcagcagttccaat

SEQ ID NO: 3963 - DNA, 25 bp, Homo sapiens
tccttcggcctcagcagttccaatt

SEQ ID NO: 3964 - DNA, 25 bp, Homo sapiens
ccttcggcctcagcagttccaattc

SEQ ID NO: 3965 - DNA, 25 bp, Homo sapiens
cttcggcctcagcagttccaattct

SEQ ID NO: 3966 - DNA, 25 bp, Homo sapiens
ttcggcctcagcagttccaattcta

SEQ ID NO: 3967 - DNA, 25 bp, Homo sapiens
tcggcctcagcagttccaattctac

SEQ ID NO: 3968 - DNA, 25 bp, Homo sapiens
cggcctcagcagttccaattctacc

SEQ ID NO: 3969 - DNA, 25 bp, Homo sapiens
ggcctcagcagttccaattctacca

SEQ ID NO: 3970 - DNA, 25 bp, Homo sapiens
gcctcagcagttccaattctaccag

SEQ ID NO: 3971 - DNA, 25 bp, Homo sapiens
cctcagcagttccaattctaccagc

SEQ ID NO: 3972 - DNA, 25 bp, Homo sapiens
ctcagcagttccaattctaccagcc

SEQ ID NO: 3973 - DNA, 25 bp, Homo sapiens
tcagcagttccaattctaccagcca

SEQ ID NO: 3974 - DNA, 25 bp, Homo sapiens
cagcagttccaattctaccagccac

SEQ ID NO: 3975 - DNA, 25 bp, Homo sapiens
agcagttccaattctaccagccaca

SEQ ID NO: 3976 - DNA, 25 bp, Homo sapiens
gcagttccaattctaccagccacag

SEQ ID NO: 3977 - DNA, 25 bp, Homo sapiens
cagttccaattctaccagccacagg

SEQ ID NO: 3978 - DNA, 25 bp, Homo sapiens
agttccaattctaccagccacaggg

SEQ ID NO: 3979 - DNA, 25 bp, Homo sapiens
gttccaattctaccagccacagggg

SEQ ID NO: 3980 - DNA, 25 bp, Homo sapiens
ttccaattctaccagccacagggga

SEQ ID NO: 3981 - DNA, 25 bp, Homo sapiens
tccaattctaccagccacaggggat

SEQ ID NO: 3982 - DNA, 25 bp, Homo sapiens
ccaattctaccagccacaggggatc

SEQ ID NO: 3983 - DNA, 25 bp, Homo sapiens
caattctaccagccacaggggatcc

SEQ ID NO: 3984 - DNA, 25 bp, Homo sapiens
aattctaccagccacaggggatccc

SEQ ID NO: 3985 - DNA, 25 bp, Homo sapiens
attctaccagccacaggggatcccc

SEQ ID NO: 3986 - DNA, 25 bp, Homo sapiens
ttctaccagccacaggggatcccct

SEQ ID NO: 3987 - DNA, 25 bp, Homo sapiens
tctaccagccacaggggatcccctc

SEQ ID NO: 3988 - DNA, 25 bp, Homo sapiens
ctaccagccacaggggatcccctcc

SEQ ID NO: 3989 - DNA, 25 bp, Homo sapiens
taccagccacaggggatcccctcct

SEQ ID NO: 3990 - DNA, 25 bp, Homo sapiens
accagccacaggggatcccctcctc

SEQ ID NO: 3991 - DNA, 25 bp, Homo sapiens
ccagccacaggggatcccctcctcc

SEQ ID NO: 3992 - DNA, 25 bp, Homo sapiens
cagccacaggggatcccctcctccc

SEQ ID NO: 3993 - DNA, 25 bp, Homo sapiens
agccacaggggatcccctcctcccc

SEQ ID NO: 3994 - DNA, 25 bp, Homo sapiens
gccacaggggatcccctcctccccc

SEQ ID NO: 3995 - DNA, 25 bp, Homo sapiens
ccacaggggatcccctcctccccct

SEQ ID NO: 3996 - DNA, 25 bp, Homo sapiens
cacaggggatcccctcctccccctc

SEQ ID NO: 3997 - DNA, 25 bp, Homo sapiens
acaggggatcccctcctccccctca

SEQ ID NO: 3998 - DNA, 25 bp, Homo sapiens
caggggatcccctcctccccctcag

SEQ ID NO: 3999 - DNA, 25 bp, Homo sapiens
aggggatcccctcctccccctcagc

SEQ ID NO: 4000 - DNA, 25 bp, Homo sapiens
ggggatcccctcctccccctcagcc

SEQ ID NO: 4001 - DNA, 25 bp, Homo sapiens
gggatcccctcctccccctcagccg

SEQ ID NO: 4002 - DNA, 25 bp, Homo sapiens
ggatcccctcctccccctcagccgt

SEQ ID NO: 4003 - DNA, 25 bp, Homo sapiens
gatcccctcctccccctcagccgtg

SEQ ID NO: 4004 - DNA, 25 bp, Homo sapiens
atcccctcctccccctcagccgtgg

SEQ ID NO: 4005 - DNA, 25 bp, Homo sapiens
tcccctcctccccctcagccgtggt

SEQ ID NO: 4006 - DNA, 25 bp, Homo sapiens
cccctcctccccctcagccgtggtg

SEQ ID NO: 4007 - DNA, 25 bp, Homo sapiens
ccctcctccccctcagccgtggtgg

SEQ ID NO: 4008 - DNA, 25 bp, Homo sapiens
cctcctccccctcagccgtggtggt

SEQ ID NO: 4009 - DNA, 25 bp, Homo sapiens
ctcctccccctcagccgtggtggtg

SEQ ID NO: 4010 - DNA, 25 bp, Homo sapiens
tcctccccctcagccgtggtggtgg

SEQ ID NO: 4011 - DNA, 25 bp, Homo sapiens
cctccccctcagccgtggtggtgga

SEQ ID NO: 4012 - DNA, 25 bp, Homo sapiens
ctccccctcagccgtggtggtggag

SEQ ID NO: 4013 - DNA, 25 bp, Homo sapiens
tccccctcagccgtggtggtggaga

SEQ ID NO: 4014 - DNA, 25 bp, Homo sapiens
ccccctcagccgtggtggtggagat

SEQ ID NO: 4015 - DNA, 25 bp, Homo sapiens
cccctcagccgtggtggtggagatg

SEQ ID NO: 4016 - DNA, 25 bp, Homo sapiens
ccctcagccgtggtggtggagatgg

SEQ ID NO: 4017 - DNA, 25 bp, Homo sapiens
cctcagccgtggtggtggagatggg

SEQ ID NO: 4018 - DNA, 25 bp, Homo sapiens
ctcagccgtggtggtggagatgggg

SEQ ID NO: 4019 - DNA, 25 bp, Homo sapiens
tcagccgtggtggtggagatggggt

SEQ ID NO: 4020 - DNA, 25 bp, Homo sapiens
cagccgtggtggtggagatggggtc

SEQ ID NO: 4021 - DNA, 25 bp, Homo sapiens
agccgtggtggtggagatggggtcc

SEQ ID NO: 4022 - DNA, 25 bp, Homo sapiens
gccgtggtggtggagatggggtcca

SEQ ID NO: 4023 - DNA, 25 bp, Homo sapiens
ccgtggtggtggagatggggtccaa

SEQ ID NO: 4024 - DNA, 25 bp, Homo sapiens
cgtggtggtggagatggggtccaag

SEQ ID NO: 4025 - DNA, 25 bp, Homo sapiens
gtggtggtggagatggggtccaagc

SEQ ID NO: 4026 - DNA, 25 bp, Homo sapiens
tggtggtggagatggggtccaagcc

SEQ ID NO: 4027 - DNA, 25 bp, Homo sapiens
ggtggtggagatggggtccaagcct

SEQ ID NO: 4028 - DNA, 25 bp, Homo sapiens
gtggtggagatggggtccaagcctg

SEQ ID NO: 4029 - DNA, 25 bp, Homo sapiens
tggtggagatggggtccaagcctgc

SEQ ID NO: 4030 - DNA, 25 bp, Homo sapiens
ggtggagatggggtccaagcctgcc

SEQ ID NO: 4031 - DNA, 25 bp, Homo sapiens
gtggagatggggtccaagcctgccc

SEQ ID NO: 4032 - DNA, 25 bp, Homo sapiens
tggagatggggtccaagcctgccct

SEQ ID NO: 4033 - DNA, 25 bp, Homo sapiens
ggagatggggtccaagcctgccctc

SEQ ID NO: 4034 - DNA, 25 bp, Homo sapiens
gagatggggtccaagcctgccctca

SEQ ID NO: 4035 - DNA, 25 bp, Homo sapiens
agatggggtccaagcctgccctcac

SEQ ID NO: 4036 - DNA, 25 bp, Homo sapiens
gatggggtccaagcctgccctcacg

SEQ ID NO: 4037 - DNA, 25 bp, Homo sapiens
atggggtccaagcctgccctcacgg

SEQ ID NO: 4038 - DNA, 25 bp, Homo sapiens
tggggtccaagcctgccctcacggg

SEQ ID NO: 4039 - DNA, 25 bp, Homo sapiens
ggggtccaagcctgccctcacgggg

SEQ ID NO: 4040 - DNA, 25 bp, Homo sapiens
gggtccaagcctgccctcacggggg

SEQ ID NO: 4041 - DNA, 25 bp, Homo sapiens
ggtccaagcctgccctcacggggga

SEQ ID NO: 4042 - DNA, 25 bp, Homo sapiens
gtccaagcctgccctcacgggggag

SEQ ID NO: 4043 - DNA, 25 bp, Homo sapiens
tccaagcctgccctcacgggggagc

SEQ ID NO: 4044 - DNA, 25 bp, Homo sapiens
ccaagcctgccctcacgggggagcc

SEQ ID NO: 4045 - DNA, 25 bp, Homo sapiens
caagcctgccctcacgggggagccc

SEQ ID NO: 4046 - DNA, 25 bp, Homo sapiens
aagcctgccctcacgggggagcccg

SEQ ID NO: 4047 - DNA, 25 bp, Homo sapiens
agcctgccctcacgggggagcccgc

SEQ ID NO: 4048 - DNA, 25 bp, Homo sapiens
gcctgccctcacgggggagcccgcc

SEQ ID NO: 4049 - DNA, 25 bp, Homo sapiens
cctgccctcacgggggagcccgccc

SEQ ID NO: 4050 - DNA, 25 bp, Homo sapiens
ctgccctcacgggggagcccgccct

SEQ ID NO: 4051 - DNA, 25 bp, Homo sapiens
tgccctcacgggggagcccgccctc

SEQ ID NO: 4052 - DNA, 25 bp, Homo sapiens
gccctcacgggggagcccgccctca

SEQ ID NO: 4053 - DNA, 25 bp, Homo sapiens
ccctcacgggggagcccgccctcac

SEQ ID NO: 4054 - DNA, 25 bp, Homo sapiens
cctcacgggggagcccgccctcacg

SEQ ID NO: 4055 - DNA, 25 bp, Homo sapiens
ctcacgggggagcccgccctcacgt

SEQ ID NO: 4056 - DNA, 25 bp, Homo sapiens
tcacgggggagcccgccctcacgtg

SEQ ID NO: 4057 - DNA, 25 bp, Homo sapiens
cacgggggagcccgccctcacgtgc

SEQ ID NO: 4058 - DNA, 25 bp, Homo sapiens
acgggggagcccgccctcacgtgca

SEQ ID NO: 4059 - DNA, 25 bp, Homo sapiens
cgggggagcccgccctcacgtgcat

SEQ ID NO: 4060 - DNA, 25 bp, Homo sapiens
gggggagcccgccctcacgtgcatc

SEQ ID NO: 4061 - DNA, 25 bp, Homo sapiens
ggggagcccgccctcacgtgcatca

SEQ ID NO: 4062 - DNA, 25 bp, Homo sapiens
gggagcccgccctcacgtgcatcag

SEQ ID NO: 4063 - DNA, 25 bp, Homo sapiens
ggagcccgccctcacgtgcatcagc

SEQ ID NO: 4064 - DNA, 25 bp, Homo sapiens
gagcccgccctcacgtgcatcagca

SEQ ID NO: 4065 - DNA, 25 bp, Homo sapiens
agcccgccctcacgtgcatcagcag

SEQ ID NO: 4066 - DNA, 25 bp, Homo sapiens
gcccgccctcacgtgcatcagcagg

SEQ ID NO: 4067 - DNA, 25 bp, Homo sapiens
cccgccctcacgtgcatcagcaggg

SEQ ID NO: 4068 - DNA, 25 bp, Homo sapiens
ccgccctcacgtgcatcagcagggg

SEQ ID NO: 4069 - DNA, 25 bp, Homo sapiens
cgccctcacgtgcatcagcaggggc

SEQ ID NO: 4070 - DNA, 25 bp, Homo sapiens
gccctcacgtgcatcagcaggggca

SEQ ID NO: 4071 - DNA, 25 bp, Homo sapiens
ccctcacgtgcatcagcaggggcag

SEQ ID NO: 4072 - DNA, 25 bp, Homo sapiens
cctcacgtgcatcagcaggggcagt

SEQ ID NO: 4073 - DNA, 25 bp, Homo sapiens
ctcacgtgcatcagcaggggcagtg

SEQ ID NO: 4074 - DNA, 25 bp, Homo sapiens
tcacgtgcatcagcaggggcagtga

SEQ ID NO: 4075 - DNA, 25 bp, Homo sapiens
cacgtgcatcagcaggggcagtgag

SEQ ID NO: 4076 - DNA, 25 bp, Homo sapiens
acgtgcatcagcaggggcagtgagg

SEQ ID NO: 4077 - DNA, 25 bp, Homo sapiens
cgtgcatcagcaggggcagtgaggc

SEQ ID NO: 4078 - DNA, 25 bp, Homo sapiens
gtgcatcagcaggggcagtgaggcc

SEQ ID NO: 4079 - DNA, 25 bp, Homo sapiens
tgcatcagcaggggcagtgaggccc

SEQ ID NO: 4080 - DNA, 25 bp, Homo sapiens
gcatcagcaggggcagtgaggcccg

SEQ ID NO: 4081 - DNA, 25 bp, Homo sapiens
catcagcaggggcagtgaggcccgg

SEQ ID NO: 4082 - DNA, 25 bp, Homo sapiens
atcagcaggggcagtgaggcccgga

SEQ ID NO: 4083 - DNA, 25 bp, Homo sapiens
tcagcaggggcagtgaggcccggac

SEQ ID NO: 4084 - DNA, 25 bp, Homo sapiens
cagcaggggcagtgaggcccggacc

SEQ ID NO: 4085 - DNA, 25 bp, Homo sapiens
agcaggggcagtgaggcccggaccc

SEQ ID NO: 4086 - DNA, 25 bp, Homo sapiens
gcaggggcagtgaggcccggaccca

SEQ ID NO: 4087 - DNA, 25 bp, Homo sapiens
caggggcagtgaggcccggacccac

SEQ ID NO: 4088 - DNA, 25 bp, Homo sapiens
aggggcagtgaggcccggacccact

SEQ ID NO: 4089 - DNA, 25 bp, Homo sapiens
ggggcagtgaggcccggacccactc

SEQ ID NO: 4090 - DNA, 25 bp, Homo sapiens
gggcagtgaggcccggacccactcc

SEQ ID NO: 4091 - DNA, 25 bp, Homo sapiens
ggcagtgaggcccggacccactccg

SEQ ID NO: 4092 - DNA, 25 bp, Homo sapiens
gcagtgaggcccggacccactccgc

SEQ ID NO: 4093 - DNA, 25 bp, Homo sapiens
cagtgaggcccggacccactccgcg

SEQ ID NO: 4094 - DNA, 25 bp, Homo sapiens
agtgaggcccggacccactccgcgg

SEQ ID NO: 4095 - DNA, 25 bp, Homo sapiens
gtgaggcccggacccactccgcggc

SEQ ID NO: 4096 - DNA, 25 bp, Homo sapiens
tgaggcccggacccactccgcggcc

SEQ ID NO: 4097 - DNA, 25 bp, Homo sapiens
gaggcccggacccactccgcggcca

SEQ ID NO: 4098 - DNA, 25 bp, Homo sapiens
aggcccggacccactccgcggccag

SEQ ID NO: 4099 - DNA, 25 bp, Homo sapiens
ggcccggacccactccgcggccagc

SEQ ID NO: 4100 - DNA, 25 bp, Homo sapiens
gcccggacccactccgcggccagct

SEQ ID NO: 4101 - DNA, 25 bp, Homo sapiens
cccggacccactccgcggccagctc

SEQ ID NO: 4102 - DNA, 25 bp, Homo sapiens
ccggacccactccgcggccagctcc

SEQ ID NO: 4103 - DNA, 25 bp, Homo sapiens
cggacccactccgcggccagctccc

SEQ ID NO: 4104 - DNA, 25 bp, Homo sapiens
ggacccactccgcggccagctccct

SEQ ID NO: 4105 - DNA, 25 bp, Homo sapiens
gacccactccgcggccagctccctc

SEQ ID NO: 4106 - DNA, 25 bp, Homo sapiens
acccactccgcggccagctccctca

SEQ ID NO: 4107 - DNA, 25 bp, Homo sapiens
cccactccgcggccagctccctcat

SEQ ID NO: 4108 - DNA, 25 bp, Homo sapiens
ccactccgcggccagctccctcatt

SEQ ID NO: 4109 - DNA, 25 bp, Homo sapiens
cactccgcggccagctccctcatta

SEQ ID NO: 4110 - DNA, 25 bp, Homo sapiens
actccgcggccagctccctcattat

SEQ ID NO: 4111 - DNA, 25 bp, Homo sapiens
ctccgcggccagctccctcattatg

SEQ ID NO: 4112 - DNA, 25 bp, Homo sapiens
tccgcggccagctccctcattatgg

SEQ ID NO: 4113 - DNA, 25 bp, Homo sapiens
ccgcggccagctccctcattatgga

SEQ ID NO: 4114 - DNA, 25 bp, Homo sapiens
cgcggccagctccctcattatggaa

SEQ ID NO: 4115 - DNA, 25 bp, Homo sapiens
gcggccagctccctcattatggaag

SEQ ID NO: 4116 - DNA, 25 bp, Homo sapiens
cggccagctccctcattatggaaga

SEQ ID NO: 4117 - DNA, 25 bp, Homo sapiens
ggccagctccctcattatggaagac

SEQ ID NO: 4118 - DNA, 25 bp, Homo sapiens
gccagctccctcattatggaagaca

SEQ ID NO: 4119 - DNA, 25 bp, Homo sapiens
ccagctccctcattatggaagacaa

SEQ ID NO: 4120 - DNA, 25 bp, Homo sapiens
cagctccctcattatggaagacaaa

SEQ ID NO: 4121 - DNA, 25 bp, Homo sapiens
agctccctcattatggaagacaaag

SEQ ID NO: 4122 - DNA, 25 bp, Homo sapiens
gctccctcattatggaagacaaaga

SEQ ID NO: 4123 - DNA, 25 bp, Homo sapiens
ctccctcattatggaagacaaagaa

SEQ ID NO: 4124 - DNA, 25 bp, Homo sapiens
tccctcattatggaagacaaagaaa

SEQ ID NO: 4125 - DNA, 25 bp, Homo sapiens
ccctcattatggaagacaaagaaat

SEQ ID NO: 4126 - DNA, 25 bp, Homo sapiens
cctcattatggaagacaaagaaatc

SEQ ID NO: 4127 - DNA, 25 bp, Homo sapiens
ctcattatggaagacaaagaaatcc

SEQ ID NO: 4128 - DNA, 25 bp, Homo sapiens
tcattatggaagacaaagaaatccc

SEQ ID NO: 4129 - DNA, 25 bp, Homo sapiens
cattatggaagacaaagaaatcccc

SEQ ID NO: 4130 - DNA, 25 bp, Homo sapiens
attatggaagacaaagaaatcccca

SEQ ID NO: 4131 - DNA, 25 bp, Homo sapiens
ttatggaagacaaagaaatccccat

SEQ ID NO: 4132 - DNA, 25 bp, Homo sapiens
tatggaagacaaagaaatccccatc

SEQ ID NO: 4133 - DNA, 25 bp, Homo sapiens
atggaagacaaagaaatccccatca

SEQ ID NO: 4134 - DNA, 25 bp, Homo sapiens
tggaagacaaagaaatccccatcaa

SEQ ID NO: 4135 - DNA, 25 bp, Homo sapiens
ggaagacaaagaaatccccatcaag

SEQ ID NO: 4136 - DNA, 25 bp, Homo sapiens
gaagacaaagaaatccccatcaaga

SEQ ID NO: 4137 - DNA, 25 bp, Homo sapiens
aagacaaagaaatccccatcaagag

SEQ ID NO: 4138 - DNA, 25 bp, Homo sapiens
agacaaagaaatccccatcaagagt

SEQ ID NO: 4139 - DNA, 25 bp, Homo sapiens
gacaaagaaatccccatcaagagtg

SEQ ID NO: 4140 - DNA, 25 bp, Homo sapiens
acaaagaaatccccatcaagagtga

SEQ ID NO: 4141 - DNA, 25 bp, Homo sapiens
caaagaaatccccatcaagagtgag

SEQ ID NO: 4142 - DNA, 25 bp, Homo sapiens
aaagaaatccccatcaagagtgagc

SEQ ID NO: 4143 - DNA, 25 bp, Homo sapiens
aagaaatccccatcaagagtgagcc

SEQ ID NO: 4144 - DNA, 25 bp, Homo sapiens
agaaatccccatcaagagtgagcct

SEQ ID NO: 4145 - DNA, 25 bp, Homo sapiens
gaaatccccatcaagagtgagcctc

SEQ ID NO: 4146 - DNA, 25 bp, Homo sapiens
aaatccccatcaagagtgagcctct

SEQ ID NO: 4147 - DNA, 25 bp, Homo sapiens
aatccccatcaagagtgagcctctg

SEQ ID NO: 4148 - DNA, 25 bp, Homo sapiens
atccccatcaagagtgagcctctgc

SEQ ID NO: 4149 - DNA, 25 bp, Homo sapiens
tccccatcaagagtgagcctctgcc

SEQ ID NO: 4150 - DNA, 25 bp, Homo sapiens
ccccatcaagagtgagcctctgcca

SEQ ID NO: 4151 - DNA, 25 bp, Homo sapiens
cccatcaagagtgagcctctgccaa

SEQ ID NO: 4152 - DNA, 25 bp, Homo sapiens
ccatcaagagtgagcctctgccaaa

SEQ ID NO: 4153 - DNA, 25 bp, Homo sapiens
catcaagagtgagcctctgccaaaa

SEQ ID NO: 4154 - DNA, 25 bp, Homo sapiens
atcaagagtgagcctctgccaaaac

SEQ ID NO: 4155 - DNA, 25 bp, Homo sapiens
tcaagagtgagcctctgccaaaacc

SEQ ID NO: 4156 - DNA, 25 bp, Homo sapiens
caagagtgagcctctgccaaaaccg

SEQ ID NO: 4157 - DNA, 25 bp, Homo sapiens
aagagtgagcctctgccaaaaccgc

SEQ ID NO: 4158 - DNA, 25 bp, Homo sapiens
agagtgagcctctgccaaaaccgcc

SEQ ID NO: 4159 - DNA, 25 bp, Homo sapiens
gagtgagcctctgccaaaaccgccc

SEQ ID NO: 4160 - DNA, 25 bp, Homo sapiens
agtgagcctctgccaaaaccgcccg

SEQ ID NO: 4161 - DNA, 23 bp, Homo sapiens
tttccggctagtgcctaatgtca

SEQ ID NO: 4162 - DNA, 23 bp, Homo sapiens
tccggtgagtttggctctacaaa

What is claimed is:

1. An isolated nucleic acid that encodes a POSH-like onco-protein that interacts with both small GTPases and the downstream effectors in the signal transduction pathway, comprising:
(a) a nucleotide sequence selected from the group consisting of:
(i) SEQ ID NO: 1;
(ii) the complement of the sequences set forth in (i);
(iii) the nucleotide sequence of SEQ ID NO: 2;
(iv) a degenerate variant of the sequences set forth in (iii); and
(v) the complement of the sequences set forth in (iii) and (iv); or
(b) a nucleotide sequence selected from the group consisting of:
(i) a nucleotide sequence that encodes a polypeptide having the sequence of SEQ ID NO: 3;
(ii) a nucleotide sequence that encodes a polypeptide having the sequence of of SEQ ID NO: 3, with conservative amino acid substitutions; and
(iii) the complement of the sequences set forth in (i) and (ii),
wherein said isolated nucleic acid comprising a nucleotide sequence selected from group (b) is no more than about 100 kb in length.

2. The isolated nucleic acid of claim 1 wherein said nucleic acid, or the complement of said nucleic acid, encodes a polypeptide having the ability to relay signals in a signal transduction pathway that is associated with tumor metastasis by interacting with both small GTPases and the downstream components in the pathway.

3. The isolated nucleic acid of claim 1, wherein said nucleic acid, or the complement of said nucleic acid, is expressed in fetal liver, adult liver, brain, lung, placenta, bone marrow, prostate, kidney, testis, adrenal gland and skeletal muscle.

4. A nucleic acid probe, comprising:
(a) the nucleic acid of claim 1; or
(b) at least 17 contiguous nucleotides of SEQ ID NO: 4,
wherein said probe according to (b) is no longer than about 100 kb in length.

5. The probe of claim 4, wherein said probe is detectably labeled.

6. The probe of claim 4, attached to a substrate.

7. A microarray, wherein at least one probe of said array is a probe according to claim 4.

8. The isolated nucleic acid molecule of claim 1, wherein said nucleic acid molecule is operably linked to one or more expression control elements.

9. A replicable vector comprising a nucleic acid molecule of claim 1.

10. A replicable vector comprising an isolated nucleic acid molecule of claim 8.

11. A host cell transformed to contain the nucleic acid molecule of any one of claims 1 or 8-10, or the progeny thereof.

12. A method for producing a polypeptide, the method comprising: culturing the host cell of claim 11 under conditions in which the protein encoded by said nucleic acid molecule is expressed.

13. An isolated polypeptide produced by the method of claim 12.

14. An isolated polypeptide, comprising:
(a) an amino acid sequence of SEQ ID NO: 3;
(b) an amino acid sequence having at least 65% amino acid sequence identity to that of (a);
(c) an amino acid sequence according to (a) in which at least 95% of deviations from the sequence of (a) are conservative substitutions; or
(d) a fragment of at least 8 contiguous amino acids of any of (a)-(c).

15. A fusion protein, said fusion protein comprising a polypeptide of claim 14 fused to a heterologous amino acid sequence.

16. The fusion protein of claim 15, wherein said heterologous amino acid sequence is a detectable moiety.

17. The fusion protein of claim 16, wherein said detectable moiety is fluorescent.

18. The fusion protein of claim 15, wherein said heterologous amino acid sequence is an Ig Fc region.

19. An isolated antibody, or antigen-binding fragment or derivative thereof, the binding of which can be competitively inhibited by a polypeptide of claim 14.

20. A transgenic non-human animal modified to contain the nucleic acid molecule of any one of claims 1 or 8-10.

21. A transgenic non-human animal unable to express the endogenous orthologue of the nucleic acid molecule of claim 1.

22. A method of identifying agents that modulate the expression of human POSHL1, the method comprising:
contacting a cell or tissue sample believed to express human POSHL1 with a chemical or biological agent, and then comparing the amount of human POSHL1 expression in said cell or tissue sample with that of a control,
changes in the amount relative to control identifying an agent that modulates expression of human POSHL1.

23. A method of identifying agonists and antagonists of human POSHL1, the method comprising:
contacting a cell or tissue sample believed to express human POSHL1 with a chemical or biological agent, and then comparing the activity of human POSHL1 with that of a control,
increased activity relative to a control identifying an agonist, decreased activity relative to a control identifying an antagonist.

24. A purified agonist of the polypeptide of claim 14.

25. A purified antagonist of the polypeptide of claim 14.

26. A method of identifying a specific binding partner for a polypeptide according to claim 14, the method comprising:
contacting said polypeptide to a potential binding partner; and
determining if the potential binding partner binds to said polypeptide.

27. The method of claim 26, wherein said contacting is performed in vivo.

28. A purified binding partner of the polypeptide of claim 14.

29. A method for detecting a target nucleic acid in a sample, said target being a nucleic acid according to claim 1, the method comprising:
(a) hybridizing the sample with a probe comprising at least 17 contiguous nucleotides of a sequence complementary to said target nucleic acid in said sample under high stringency hybridization conditions, and
(b) detecting the presence or absence, and optionally the amount, of said binding.

30. A method of diagnosing a disease caused by mutation in human POSHL1, comprising:
detecting said mutation in a sample of nucleic acids that derives from a subject suspected to have said disease.

31. A method of diagnosing or monitoring a disease caused by altered expression of human POSHL1, comprising:
determining the level of expression of human POSHL1 in a sample of nucleic acids or proteins that derives from a subject suspected to have said disease,
alterations from a normal level of expression providing diagnostic and/or monitoring information.

32. A diagnostic composition comprising the nucleic acid of claim 1, said nucleic acid being detectably labeled.

33. The diagnostic composition of claim 32, wherein said composition is further suitable for in vivo administration.

34. A diagnostic composition comprising the polypeptide of claim 14, said polypeptide being detectably labeled.

35. The diagnostic composition of claim 34, wherein said composition is further suitable for in vivo administration.

36. A diagnostic composition comprising the antibody, or antigen-binding fragment or derivative thereof, of claim 19.

37. The diagnostic composition of claim 36, wherein said antibody or antigen-binding fragment or derivative thereof is detectably labeled.

38. The diagnostic composition of claim 37, wherein said composition is further suitable for in vivo administration.

39. A pharmaceutical composition comprising the nucleic acid of claim 1 and a pharmaceutically acceptable excipient.

40. A pharmaceutical composition comprising the polypeptide of claim 14 and a pharmaceutically acceptable excipient.

41. A pharmaceutical composition comprising the antibody or antigen-binding fragment or derivative thereof of claim 19 and a pharmaceutically acceptable excipient.

42. A pharmaceutical composition comprising the agonist of claim 24 and a pharmaceutically acceptable excipient.

43. A pharmaceutical composition comprising the antagonist of claim 25 and a pharmaceutically acceptable excipient.

44. A method for treating or preventing a disorder associated with decreased expression or activity of human POSHL1, the method comprising administering to a subject in need of such treatment an effective amount of the pharmaceutical composition of any of claims 39, 40 or 42.

45. A method for treating or preventing a disorder associated with increased expression or activity of human POSHL1, the method comprising administering to a subject in need of such treatment an effective amount of the pharmaceutical composition of claim 41 or 43.

46. A method of modulating the expression of a nucleic acid according to claim 1, the method comprising:
administering an effective amount of an agent which modulates the expression of a nucleic acid according to claim 1.

47. A method of modulating at least one activity of a polypeptide according to claim 14, the method comprising:
administering an effective amount of an agent which modulates at least one activity of a polypeptide according to claim 14.
